(19) United States
(12) Patent Application Publication
(10) Pub. No.: US 2015/0291966 A1
(43) Pub. Date: Oct. 15, 2015

(54) INDUCIBLE DNA BINDING PROTEINS AND GENOME PERTURBATION TOOLS AND APPLICATIONS THEREOF

(71) Applicants: The Broad Institute, Inc., Cambridge, MA (US); Massachusetts Institute of Technology, Cambridge, MA (US); President And Fellows of Harvard College, Cambridge, MA (US)

(72) Inventors: Feng Zhang, Cambridge, MA (US); Mark Brigham, Somerville, MA (US); Le Cong, Cambridge, MA (US); Silvana Konermann, Zurich (CH); Neville Espi Sanjana, Cambridge, MA (US)

(21) Appl. No.: 14/604,641

(22) Filed: Jan. 23, 2015

Related U.S. Application Data
(63) Continuation-in-part of application No. PCT/US13/51418, filed on Jul. 21, 2013.
(60) Provisional application No. 61/675,778, filed on Jul. 25, 2012.
(60) Provisional application No. 61/721,283, filed on Nov. 1, 2012.
(60) Provisional application No. 61/736,465, filed on Dec. 12, 2012.
(60) Provisional application No. 61/794,458, filed on Mar. 15, 2013.
(60) Provisional application No. 61/835,973, filed on Jun. 17, 2013.

(51) Int. Cl. C12N 15/63

(52) U.S. Cl. CPC C12N 15/635

(57) ABSTRACT

The present invention generally relates to methods and compositions used for the spatial and temporal control of gene expression that may use inducible transcriptional effectors. The invention particularly relates to inducible methods of altering or perturbing expression of a genomic locus of interest in a cell wherein the genomic locus may be contacted with a non-naturally occurring or engineered composition comprising a deoxyribonucleic acid (DNA) binding polypeptide.

### RELATED APPLICATIONS AND INCORPORATION BY REFERENCE

[0001] This application is a continuation-in part of international patent application Serial No. PCT/US13/51418 filed Jul. 21, 2013, which published as WO2014/018423 on Jan. 30, 2014 which claims priority to and claims benefit of US provisional patent application Serial Nos. 61/675,778 filed Jul. 25, 2012, 61/721,283 filed Nov. 1, 2012, 61/736,465 filed Dec. 12, 2012, 61/794,458 filed Mar. 15, 2013 and 61/835,973 filed Jun. 17, 2013 titled INDUCIBLE DNA BINDING PROTEINS AND GENOME PERTURBATION TOOLS AND APPLICATIONS THEREOF.

[0002] Reference is also made to U.S. Provisional Application No. 61/565,171 filed Nov. 30, 2011 and U.S. application Ser. No. 13/554,922 filed Jul. 30, 2012 and Ser. No. 13/604,945 filed Sep. 6, 2012, titled NUCLEOTIDE-SPECIFIC RECOGNITION SEQUENCES FOR DESIGNER TAL EFFECTORS.

[0003] Reference is also made to U.S. Provisional Application Nos. 61/736,527 filed Dec. 12, 2012; 61/748,427 filed Jan. 2, 2013; 61/757,972 filed Jan. 29, 2013, 61/768,959, filed Feb. 25, 2013 and 61/791,409 filed Mar. 15, 2013, titled SYSTEMS METHODS AND COMPOSITIONS FOR SEQUENCE MANIPULATION.

[0004] Reference is also made to U.S. Provisional Application Nos. 61/758,468 filed Jan. 30, 2013 and 61/769,046 filed Mar. 15, 2013, titled ENGINEERING AND OPTIMIZATION OF SYSTEMS, METHODS AND COMPOSITIONS FOR SEQUENCE MANIPULATION.

[0005] Reference is also made to U.S. Provisional Application Nos. 61/835,931; 61/835,936; 61/836,080; 61/836,101; 61/836,123 and 61/836,127 filed Jun. 17, 2013.

[0006] Reference is also made to U.S. Provisional Application No. 61/842,322, filed Jul. 2, 2013, titled CRISPR-CAS SYSTEMS AND METHODS FOR ALTERING EXPRESSION OF GENE PRODUCTS and U.S. Provisional Application No. 61/847,537, filed Jul. 17, 2013, titled DELIVERY. ENGINEERING AND OPTIMIZATION OF SYSTEMS, METHODS AND COMPOSITIONS FOR SEQUENCE MANIPULATION AND APPLICATIONS.

[0007] The foregoing applications, and all documents cited therein or during their prosecution (“appln cited documents”) and all documents cited or referenced in the appln cited documents, and all documents cited or referenced herein (“herein cited documents”), and all documents cited or referenced in herein cited documents, together with any manufacturer's instructions, descriptions, product specifications, and product sheets for any products mentioned herein or in any document incorporated by reference herein, are hereby incorporated herein by reference, and may be employed in the practice of the invention. More specifically, all referenced documents are incorporated by reference to the same extent as if each individual document was specifically and individually indicated to be incorporated by reference.

### FEDERAL FUNDING LEGEND

[0008] This invention was made with government support under R01NS073124 and Pioneer Award 1DP1MH100706 awarded by the National Institutes of Health. The Government has certain rights in the invention.

### FIELD OF THE INVENTION

[0009] The present invention generally relates to methods and compositions used for the spatial and temporal control of gene expression, such as genome perturbation, that may use inducible transcriptional effectors.

### SEQUENCE LISTING

[0010] The instant application contains a Sequence Listing which has been submitted electronically in ASCII format and is hereby incorporated by reference in its entirety. Said ASCII copy, created on Feb. 16, 2015, is named 44790.04.2005_SL.txt and is 827.181 bytes in size.

### BACKGROUND OF THE INVENTION

[0011] Normal gene expression is a dynamic process with carefully orchestrated temporal and spatial components, the precision of which are necessary for normal development, homeostasis, and advancement of the organism. In turn, the dysregulation of required gene expression patterns, either by increased, decreased, or altered function of a gene or set of genes, has been linked to a wide array of pathologies. Technologies capable of modulating gene expression in a spatiotemporally precise fashion will enable the elucidation of the genetic cues responsible for normal biological processes and disease mechanisms. To address this technological need, Applicants developed inducible molecular tools that may regulate gene expression, in particular, light-inducible transcriptional effectors (LITEs), which provide light-mediated control of endogenous gene expression.

[0012] Inducible gene expression systems have typically been designed to allow for chemically induced activation of an inserted open reading frame or shRNA sequence, resulting in gene overexpression or repression, respectively. Disadvantages of using open reading frames for overexpression include loss of splice variation and limitation of gene size. Gene repression via RNA interference, despite its transformative power in human biology, can be hindered by complicated off-target effects. Certain inducible systems including estrogen, ecdysone, and FKBP12/FRAP based systems are known to activate off-target endogenous genes. The potentially deleterious effects of long-term antibiotic treatment can complicate the use of tetracycline transactivator (TET) based systems. In vivo, the temporal precision of these chemically inducible systems is dependent upon the kinetics of inducing agent uptake and elimination. Further, because inducing agents are generally delivered systemically, the spatial precision of such systems is bounded by the precision of exogenous vector delivery.

[0013] US Patent Publication No. 20030049799 relates to engineered stimulus-responsive switches to cause a detectable output in response to a preselected stimulus.

[0014] There is an evident need for methods and compositions that allow for efficient and precise spatial and temporal control of a genomic locus of interest. These methods and compositions may provide for the regulation and modulation of genomic expression both in vivo and in vitro as well as provide for novel treatment methods for a number of disease pathologies.

[0015] Citation or identification of any document in this application is not an admission that such document is available as prior art to the present invention.

### SUMMARY OF THE INVENTION

[0016] In one aspect the invention provides a non-naturally occurring or engineered TALE or CRISPR-Cas system which may comprise at least one switch wherein the activity of said TALE or CRISPR-Cas system is controlled by contact with at least one inducer energy source as to the switch. In an embodiment of the invention the control as to the at least one switch or the activity of said TALE or CRISPR-Cas system may be activated, enhanced, terminated or repressed. The contact with the at least one inducer energy source may result in a first effect and a second effect. The first effect may be one or more of nuclear import, nuclear export, recruitment of a secondary component (such as an effector molecule), conformational change (of protein. DNA or RNA), cleavage, release of cargo (such as a caged molecule or a co-factor), association or dissociation. The second effect may be one or more of activation, enhancement, termination or repression of the control as to the at least one switch or the activity of said TALE or CRISPR-Cas system. In one embodiment the first effect and the second effect may occur in a cascade.

[0017] In another aspect of the invention the TALE or CRISPR-Cas system may further comprise at least one nuclear localization signal (NLS), nuclear export signal (NES), functional domain, flexible linker, mutation, deletion, alteration or truncation. The one or more of the NLS, the NES or the functional domain may be conditionally activated or inactivated. In another embodiment, the mutation may be one or more of a mutation in a transcription factor homology region, a mutation in a DNA binding domain (such as mutating basic residues of a basic helix loop helix), a mutation in an endogenous NLS or a mutation in an endogenous NES. The invention comprehends that the inducer energy source may be heat, ultrasound, electromagnetic energy or chemical. In a preferred embodiment of the invention, the inducer energy source may be an antibiotic, a small molecule, a hormone, a hormone derivative, a steroid or a steroid derivative. In a more preferred embodiment, the inducer energy source maybe abscisic acid (ABA), doxycycline (DOX), cumate, rapamycin, 4-hydroxytamoxifen (4OHT), estrogen or ecdysone. The invention provides that the at least one switch may be selected from the group consisting of antibiotic based inducible systems, electromagnetic energy based inducible systems, small molecule based inducible systems, nuclear receptor based inducible systems and hormone based inducible systems. In a more preferred embodiment the at least one switch may be selected from the group consisting of tetracycline (Tet)/DOX inducible systems, light inducible systems, ABA inducible systems, cumate repressor/operator systems, 4OHT/estrogen inducible systems, ecdysone-based inducible systems and FKBP12/FRAP (FKBP12-rapamycin complex) inducible systems.

[0018] In one aspect of the invention the inducer energy source is electromagnetic energy. The electromagnetic energy may be a component of visible light having a wavelength in the range of 450 nm-700 nm. In a preferred embodiment the component of visible light may have a wavelength in the range of 450 nm-500 nm and may be blue light. The blue light may have an intensity of at least 0.2 mW/cm², or more preferably at least 4 mW/cm². In another embodiment, the component of visible light may have a wavelength in the range of 620-700 nm and is red light.

[0019] The invention comprehends systems wherein the at least one functional domain may be selected from the group consisting of: transposase domain, integrase domain, recombinase domain, resolvase domain, invertase domain, protease domain, DNA methyltransferase domain, DNA hydroxylmethylase domain, DNA demethylase domain, histone acetylase domain, histone deacetylases domain, nuclease domain, repressor domain, activator domain, nuclear-localization signal domains, transcription-regulatory protein (or transcription complex recruiting) domain, cellular uptake activity associated domain, nucleic acid binding domain, antibody presentation domain, histone modifying enzymes, recruiter of histone modifying enzymes; inhibitor of histone modifying enzymes, histone methyltransferase, histone demethylase, histone kinase, histone phosphatase, histone ribosylase, histone deribosylase, histone ubiquitinase, histone deubiquitinase, histone biotinase and histone tail protease.

[0020] The invention also provides for use of the system for perturbing a genomic or epigenomic locus of interest. Also provided are uses of the system for the preparation of a pharmaceutical compound.

[0021] In a further aspect, the invention provides a method of controlling a non-naturally occurring or engineered TALE or CRISPR-Cas system, comprising providing said TALE or CRISPR-Cas system comprising at least one switch wherein the activity of said TALE or CRISPR-Cas system is controlled by contact with at least one inducer energy source as to the switch.

[0022] In an embodiment of the invention, the invention provides methods wherein the control as to the at least one switch or the activity of said TALE or CRISPR-Cas system may be activated, enhanced, terminated or repressed. The contact with the at least one inducer energy source may result in a first effect and a second effect. The first effect may be one or more of nuclear import, nuclear export, recruitment of a secondary component (such as an effector molecule), conformational change (of protein, DNA or RNA), cleavage, release of cargo (such as a caged molecule or a co-factor), association or dissociation. The second effect may be one or more of activation, enhancement, termination or repression of the control as to the at least one switch or the activity of said TALE or CRISPR-Cas system. In one embodiment the first effect and the second effect may occur in a cascade.

[0023] In another aspect of the methods of the invention the TALE or CRISPR-Cas system may further comprise at least one nuclear localization signal (NLS), nuclear export signal (NES), functional domain, flexible linker, mutation, deletion, alteration or truncation. The one or more of the NLS, the NES or the functional domain may be conditionally activated or inactivated. In another embodiment, the mutation may be one or more of a mutation in a transcription factor homology region, a mutation in a DNA binding domain (such as mutating basic residues of a basic helix loop helix), a mutation in an endogenous NLS or a mutation in an endogenous NES.

[0024] The invention comprehends that the inducer energy source may be heat, ultrasound, electromagnetic energy or chemical. In a preferred embodiment of the invention, the inducer energy source may be an antibiotic, a small molecule, a hormone, a hormone derivative, a steroid or a steroid derivative. In a more preferred embodiment, the inducer energy source maybe abscisic acid (ABA), doxycycline (DOX), cumate, rapamycin, 4-hydroxytamoxifen (4OHT), estrogen or ecdysone. The invention provides that the at least one switch may be selected from the group consisting of antibiotic based inducible systems, electromagnetic energy based inducible systems, small molecule based inducible systems, nuclear receptor based inducible systems and hormone based inducible systems. In a more preferred embodiment the at least one switch may be selected from the group consisting of tetracycline (Tet)/DOX inducible systems, light inducible systems, ABA inducible systems, cumate repressor/operator systems, 4OHT/estrogen inducible systems, ecdysone-based inducible systems and FKBP12/FRAP (FKBP12-rapamycin complex) inducible systems.

[0025] In one aspect of the methods of the invention the inducer energy source is electromagnetic energy. The electromagnetic energy may be a component of visible light having a wavelength in the range of 450 nm-700 nm. In a preferred embodiment the component of visible light may have a wavelength in the range of 450 nm-500 nm and may be blue light. The blue light may have an intensity of at least 0.2 mW/cm², or more preferably at least 4 mW/cm². In another embodiment, the component of visible light may have a wavelength in the range of 620-700 nm and is red light.

[0026] The invention comprehends methods wherein the at least one functional domain may be selected from the group consisting of: transposase domain, integrase domain, recombinase domain, resolvase domain, invertase domain, protease domain, DNA methyltransferase domain. DNA hydroxylmethylase domain, DNA demethylase domain, histone acetylase domain, histone deacetylases domain, nuclease domain, repressor domain, activator domain, nuclear-localization signal domains, transcription-regulatory protein (or transcription complex recruiting) domain, cellular uptake activity associated domain, nucleic acid binding domain, antibody presentation domain, histone modifying enzymes, recruiter of histone modifying enzymes; inhibitor of histone modifying enzymes, histone methyltransferase, histone demethylase, histone kinase, histone phosphatase, histone ribosylase, histone deribosylase, histone ubiquitinase, histone deubiquitinase, histone biotinase and histone tail protease.

[0027] Further aspects of the invention provides for systems or methods as described herein wherein the TALE system comprises a DNA binding polypeptide comprising:

(i) a DNA binding domain comprising at least five or more Transcription activator-like effector (TALE) monomers and at least one or more half-monomers specifically ordered to target a locus of interest or
at least one or more effector domains
linked to an energy sensitive protein or fragment thereof, wherein the energy sensitive protein or fragment thereof undergoes a conformational change upon induction by an inducer energy source allowing it to bind an interacting partner, and/or
(ii) a DNA binding domain comprising at least one or more TALE monomers or half-monomers specifically ordered to target the locus of interest or at least one or more effector domains
linked to the interacting partner, wherein the energy sensitive protein or fragment thereof binds to the interacting partner upon induction by the inducer energy source.

[0028] The systems and methods of the invention provide for the DNA binding polypeptide comprising a (a) a N-terminal capping region (b) a DNA binding domain comprising at least 5 to 40 Transcription activator-like effector (TALE) monomers and at least one or more half-monomers specifically ordered to target the locus of interest, and (c) a C-terminal capping region wherein (a), (b) and (c) may be arranged in a predetermined N-terminus to C-terminus orientation, wherein the genomic locus comprises a target DNA sequence 5′-T₀N₁N₂ . . . N, N₁-3′, where T₀ and N=A, G, T or C, wherein the target DNA sequence binds to the DNA binding domain, and the DNA binding domain may comprise (X₁₋₁₁-X₁₂X₁₃-X_{14-33 or 34 or 35})z, wherein X₁₋₁₁ is a chain of 11 contiguous amino acids, wherein X₁₂X₁₃ is a repeat variable diresidue (RVD), wherein X_{14-33 or 34 or 35} is a chain of 21, 22 or 23 contiguous amino acids, wherein z may be at least 5 to 40, wherein the polypeptide may be encoded by and translated from a codon optimized nucleic acid molecule so that the polypeptide preferentially binds to DNA of the locus of interest.

[0029] In a further embodiment, the system or method of the invention provides the N-terminal capping region or fragment thereof comprises 147 contiguous amino acids of a wild type N-terminal capping region, or the C-terminal capping region or fragment thereof comprises 68 contiguous amino acids of a wild type C-terminal capping region, or the N-terminal capping region or fragment thereof comprises 136 contiguous amino acids of a wild type N-terminal capping region and the C-terminal capping region or fragment thereof comprises 183 contiguous amino acids of a wild type C-terminal capping region. In another embodiment, the at least one RVD may be selected from the group consisting of (a) HH, KH, NH, NK, NQ, RH, RN, SS, NN, SN, KN for recognition of guanine (G); (b) NI, KI, RI, HI, SI for recognition of adenine (A); (c) NG, HG. KG, RG for recognition of thymine (T); (d) RD, SD, HD, ND, KD, YG for recognition of cytosine (C); (e) NV, HN for recognition of A or G; and (f) H*, HA, KA, N*, NA, NC, NS, RA, S*for recognition of A or T or G or C, wherein (*) means that the amino acid at X13 is absent.

[0030] In yet another embodiment the at least one RVD may be selected from the group consisting of (a) HH, KH, NH, NK, NQ, RH, RN, SS for recognition of guanine (G); (b) SI for recognition of adenine (A); (c) HG, KG, RG for recognition of thymine (T); (d) RD, SD for recognition of cytosine (C); (e) NV, HN for recognition of A or G and (f) H*, HA, KA, N*, NA, NC, NS, RA, S*for recognition of A or T or G or C, wherein (*) means that the amino acid at X13 is absent. In a preferred embodiment, the RVD for the recognition of G is RN, NH, RH or KH; or the RVD for the recognition of A is SI; or the RVD for the recognition of T is KG or RG; and the RVD for the recognition of C is SD or RD. In yet another embodiment, at least one of the following is present [LTLD](SEQ ID NO: 1) or [LTLA](SEQ ID NO: 2) or [LTQV](SEQ ID NO: 3) at X1-4, or [EQHG](SEQ ID NO: 4) or [RDHG](SEQ ID NO: 5) at positions X30-33 or X31-34 or X32-35.

[0031] In an aspect of the invention the TALE system is packaged into a AAV or a lentivirus vector.

[0032] Further aspects of the invention provides for systems or methods as described herein wherein the CRISPR system may comprise a vector system comprising: a) a first regulatory element operably linked to a CRISPR-Cas system guide RNA that targets a locus of interest, b) a second regulatory inducible element operably linked to a Cas protein, wherein components (a) and (b) may be located on same or different vectors of the system, wherein the guide RNA targets DNA of the locus of interest, wherein the Cas protein and the guide RNA do not naturally occur together. In a preferred embodiment of the invention, the Cas protein is a Cas9 enzyme. The invention also provides for the vector being a AAV or a lentivirus.

[0033] The invention particularly relates to inducible methods of altering expression of a genomic locus of interest and to compositions that inducibly alter expression of a genomic locus of interest wherein the genomic locus may be contacted with a non-naturally occurring or engineered composition comprising a deoxyribonucleic acid (DNA) binding polypeptide.

[0034] This polypeptide may include a DNA binding domain comprising at least five or more Transcription activator-like effector (TALE) monomers and at least one or more half-monomers specifically ordered to target the genomic locus of interest or at least one or more effector domains linked to an energy sensitive protein or fragment thereof. The energy sensitive protein or fragment thereof may undergo a conformational change upon induction by an energy source allowing it to bind an interacting partner. The polypeptide may also include a DNA binding domain comprising at least one or more variant TALE monomers or half-monomers specifically ordered to target the genomic locus of interest or at least one or more effector domains linked to the interacting partner, wherein the energy sensitive protein or fragment thereof may bind to the interacting partner upon induction by the energy source. The method may also include applying the energy source and determining that the expression of the genomic locus is altered. In preferred embodiments of the invention the genomic locus may be in a cell.

[0035] The invention also relates to inducible methods of repressing expression of a genomic locus of interest and to compositions that inducibly repress expression of a genomic locus of interest wherein the genomic locus may be contacted with a non-naturally occurring or engineered composition comprising a DNA binding polypeptide.

[0036] The polypeptide may include a DNA binding domain comprising at least five or more Transcription activator-like effector (TALE) monomers and at least one or more half-monomers specifically ordered to target the genomic locus of interest or at least one or more repressor domains linked to an energy sensitive protein or fragment thereof. The energy sensitive protein or fragment thereof may undergo a conformational change upon induction by an energy source allowing it to bind an interacting partner. The polypeptide may also include a DNA binding domain comprising at least one or more variant TALE monomers or half-monomers specifically ordered to target the genomic locus of interest or at least one or more effector domains linked to the interacting partner, wherein the energy sensitive protein or fragment thereof may bind to the interacting partner upon induction by the energy source. The method may also include applying the energy source and determining that the expression of the genomic locus is repressed. In preferred embodiments of the invention the genomic locus may be in a cell.

[0037] The invention also relates to inducible methods of activating expression of a genomic locus of interest and to compositions that inducibly activate expression of a genomic locus of interest wherein the genomic locus may be contacted with a non-naturally occurring or engineered composition comprising a DNA binding polypeptide.

[0038] The polypeptide may include a DNA binding domain comprising at least five or more TALE monomers and at least one or more half-monomers specifically ordered to target the genomic locus of interest or at least one or more activator domains linked to an energy sensitive protein or fragment thereof. The energy sensitive protein or fragment thereof may undergo a conformational change upon induction by an energy source allowing it to bind an interacting partner. The polypeptide may also include a DNA binding domain comprising at least one or more variant TALE monomers or half-monomers specifically ordered to target the genomic locus of interest or at least one or more effector domains linked to the interacting partner, wherein the energy sensitive protein or fragment thereof may bind to the interacting partner upon induction by the energy source. The method may also include applying the energy source and determining that the expression of the genomic locus is activated. In preferred embodiments of the invention the genomic locus may be in a cell.

[0039] In another preferred embodiment of the invention, the inducible effector may be a Light Inducible Transcriptional Effector (LITE). The modularity of the LITE system allows for any number of effector domains to be employed for transcriptional modulation.

[0040] In yet another preferred embodiment of the invention, the inducible effector may be a chemical.

[0041] The present invention also contemplates an inducible multiplex genome engineering using CRISPR (clustered regularly interspaced short palindromic repeats)/Cas systems.

[0042] The present invention also encompasses nucleic acid encoding the polypeptides of the present invention. The nucleic acid may comprise a promoter, advantageously human Synapsin I promoter (hSyn). In a particularly advantageous embodiment, the nucleic acid may be packaged into an adeno associated viral vector (AAV).

[0043] The invention further also relates to methods of treatment or therapy that encompass the methods and compositions described herein.

[0044] Accordingly, it is an object of the invention not to encompass within the invention any previously known product, process of making the product, or method of using the product such that Applicants reserve the right and hereby disclose a disclaimer of any previously known product, process, or method. It is further noted that the invention does not intend to encompass within the scope of the invention any product, process, or making of the product or method of using the product, which does not meet the written description and enablement requirements of the USPTO (35 U.S.C. §112, first paragraph) or the EPO (Article 83 of the EPC), such that Applicants reserve the right and hereby disclose a disclaimer of any previously described product, process of making the product, or method of using the product. It may be advantageous in the practice of the invention to be in compliance with Art. 53(c) EPC and Rule 28(b) and (c) EPC. Nothing herein is to be construed as a promise.

[0045] It is noted that in this disclosure and particularly in the claims and/or paragraphs, terms such as “comprises”, “comprised”, “comprising” and the like can have the meaning attributed to it in U.S. Patent law; e.g., they can mean “includes”, “included”, “including”, and the like; and that terms such as “consisting essentially of” and “consists essentially of” have the meaning ascribed to them in U.S. Patent law, e.g., they allow for elements not explicitly recited, but exclude elements that are found in the prior art or that affect a basic or novel characteristic of the invention.

[0046] These and other embodiments are disclosed or are obvious from and encompassed by, the following Detailed Description.

### BRIEF DESCRIPTION OF THE DRAWINGS

[0047] The following detailed description, given by way of example, but not intended to limit the invention solely to the specific embodiments described, may best be understood in conjunction with the accompanying drawings.

[0048] FIG. 1 shows a schematic indicating the need for spatial and temporal precision.

[0049] FIG. 2 shows transcription activator like effectors (TALEs). TALEs consist of 34 aa repeats at the core of their sequence. Each repeat corresponds to a base in the target DNA that is bound by the TALE. Repeats differ only by 2 variable amino acids at positions 12 and 13. The code of this correspondence has been elucidated (Boch, J et al., Science, 2009 and Moscou, M et al., Science, 2009) and is shown in this figure. Applicants have developed a method for the synthesis of designer TALEs incorporating this code and capable of binding a sequence of choice within the genome (Zhang, F et al., Nature Biotechnology, 2011). FIG. 2 discloses SEQ ID NOS 212-213, respectively, in order of appearance.

[0050] FIG. 3 shows a design of a LITE: TALE/Cryptochrome transcriptional activation. Each LITE is a two-component system which may comprise a TALE fused to CRY2 and the cryptochrome binding partner CIB1 fused to VP64, a transcription activor. In the inactive state, the TALE localizes its fused CRY2 domain to the promoter region of the gene of interest. At this point, CIB1 is unable to bind CRY2, leaving the CIB1-VP64 unbound in the nuclear space. Upon stimulation with 488 nm (blue) light, CRY2 undergoes a conformational change, revealing its CIB1 binding site (Liu, H et al., Science, 2008). Rapid binding of CIB1 results in recruitment of the fused VP64 domain, which induces transcription of the target gene.

[0051] FIG. 4 shows effects of cryptochrome dimer truncations on LITE activity. Truncations known to alter the activity of CRY2 and CIB1 (Kennedy M et al., Nature Methods 2010) were compared against the full length proteins. A LITE targeted to the promoter of Neurog2 was tested in Neuro-2a cells for each combination of domains. Following stimulation with 488 nm light, transcript levels of Neurog2 were quantified using qPCR for stimulated and unstimulated samples.

[0052] FIG. 5 shows a light-intensity dependent response of KLF4 LITE.

[0053] FIG. 6 shows activation kinetics of Neurog2 LITE and inactivation kinetics of Neurog2 LITE.

[0054] FIG. 7A shows the base-preference of various RVDs as determined using the Applicants' RVD screening system.

[0055] FIG. 7B shows the base-preference of additional RVDs as determined using the Applicants' RVD screening system.

[0056] FIGS. 8A-D show in (a) Natural structure of TALEs derived from Xanthononas sp. Each DNA-binding module consists of 34 amino acids, where the RVDs in the 12th and 13th amino acid positions of each repeat specify the DNA base being targeted according to the cipher NG=T, HD=C, NI=A, and NN=G or A. The DNA-binding modules are flanked by nonrepetitive N and C termini, which carry the translocation, nuclear localization (NLS) and transcription activation (AD) domains. A cryptic signal within the N terminus specifies a thymine as the first base of the target site. (b) The TALE toolbox allows rapid and inexpensive construction of custom TALE-TFs and TALENs. The kit consists of 12 plasmids in total: four monomer plasmids to be used as templates for PCR amplification, four TALE-TF and four TALEN cloning backbones corresponding to four different bases targeted by the 0.5 repeat. CMV, cytomegalovirus promoter; N term, nonrepetitive N terminus from the Hax3 TALE; C term, nonrepetitive C terminus from the Hax3 TALE; BsaI, type IIs restriction sites used for the insertion of custom TALE DNA-binding domains; ccdB+CmR, negative selection cassette containing the ccdB negative selection gene and chloramphenicol resistance gene; NLS, nuclear localization signal; VP64, synthetic transcriptional activator derived from VP16 protein of herpes simplex virus; 2A, 2A self-cleavage linker. EGFP, enhanced green fluorescent protein; polyA signal, polyadenylation signal; FokI, catalytic domain from the FokI endonuclease. (c) TALEs may be used to generate custom TALE-TFs and modulate the transcription of endogenous genes from the genome. The TALE DNA-binding domain is fused to the synthetic VP64 transcriptional activator, which recruits RNA polymerase and other factors needed to initiate transcription. (d) TALENs may be used to generate site-specific double-strand breaks to facilitate genome editing through nonhomologous repair or homology directed repair. Two TALENs target a pair of binding sites flanking a 16-bp spacer. The left and right TALENs recognize the top and bottom strands of the target sites, respectively. Each TALE DNA-binding domain is fused to the catalytic domain of FokI endonuclease; when FokI dimerizes, it cuts the DNA in the region between the left and right TALEN-binding sites. FIG. 8A discloses SEQ ID NOS 212-213, respectively, in order of appearance.

[0057] FIG. 9A-F shows a table listing monomer sequences (SEQ ID NOS 214-444, respectively, in order of appearance) (excluding the RVDs at positions 12 and 13) and the frequency with which monomers having a particular sequence occur.

[0058] FIG. 10 shows the comparison of the effect of non-RVD amino acid on TALE activity. FIG. 10 discloses SEQ ID NOS 215, 214, 221, 218, 244, 445, 214, 219, 334, 446, 251, and 447, respectively, in order of appearance.

[0059] FIG. 11 shows an activator screen comparing levels of activation between VP64, p65 and VP16.

[0060] FIGS. 12A-D show the development of a TALE transcriptional repressor architecture. (a) Design of SOX2 TALE for TALE repressor screening. A TALE targeting a 14 bp sequence within the SOX2 locus of the human genome was synthesized. (b) List of all repressors screened and their host origin (left). Eight different candidate repressor domains were fused to the C-term of the SOX2 TALE. (c) The fold decrease of endogenous SOX2 mRNA is measured using qRTPCR by dividing the SOX2 mRNA levels in mock transfected cells by SOX2 mRNA levels in cells transfected with each candidate TALE repressor. (d) Transcriptional repression of endogenous CACNA1C. TALEs using NN, NK, and NH as the G-targeting RVD were constructed to target a 18 bp target site within the human CACNA1C locus. Each TALE is fused to the SID repression domain. NLS, nuclear localization signal; KRAB, Krüppel-associated box; SID, mSin interaction domain. All results are collected from three independent experiments in HEK 293FT cells. Error bars indicate s.e.m.; n=3. * p<0.05, Student's t test. FIGS. 12A and 12D disclose SEQ ID NOS 448 and 449, respectively.

[0061] FIGS. 13A-C shows the optimization of TALE transcriptional repressor architecture using SID and SID4X. (a) Design of p11 TALE for testing of TALE repressor architecture. A TALE targeting a 20 bp sequence (p11 TALE binding site) within the p11 (s100a10) locus of the mouse (Mus musculus) genome was synthesized. (b) Transcriptional repression of endogenous mouse p11 mRNA. TALEs targeting the mouse p11 locus harboring two different truncations of the wild type TALE architecture were fused to different repressor domains as indicated on the x-axis. The value in the bracket indicate the number of amino acids at the N- and C-termini of the TALE DNA binding domain flanking the DNA binding repeats, followed by the repressor domain used in the construct. The endogenous p11 mRNA levels were measured using qRT-PCR and normalized to the level in the negative control cells transfected with a GFP-encoding construct. (c) Fold of transcriptional repression of endogenous mouse p11. The fold decrease of endogenous p11 mRNA is measured using qRT-PCR through dividing the p11 mRNA levels in cells transfected with a negative control GFP construct by p11 mRNA levels in cells transfected with each candidate TALE repressors. The labeling of the constructs along the x-axis is the same as previous panel. NLS, nuclear localization signal; SID, mSin interaction domain; SID4X, an optimized four-time tandem repeats of SID domain linked by short peptide linkers. All results are collected from three independent experiments in Neuro2A cells. Error bars indicate s.e.m.; n=3. *** p<0.001, Student's t test. FIG. 13A discloses SEQ ID NO: 450.

[0062] FIG. 14A-D shows a comparison of two different types of TALE architecture.

[0063] FIGS. 15A-C show a chemically inducible TALE ABA inducible system. ABI (ABA insensitive 1) and PYL (PYL protein: pyrabactin resistance (PYR)/PYR1-like (PYL)) are domains from two proteins listed below that will dimerize upon binding of plant hormone Abscisic Acid (ABA). This plant hormone is a small molecule chemical that Applicants used in Applicants' inducible TALE system. In this system, the TALE DNA-binding polypeptide is fused to the ABI domain, whereas the VP64 activation domain or SID repressor domain or any effector domains are linked to the PYL domain. Thus, upon the induction by the presence of ABA molecule, the two interacting domains, ABI and PYL, will dimerize and allow the TALE to be linked to the effector domains to perform its activity in regulating target gene expression.

[0064] FIGS. 16A-B show a chemically inducible TALE 4OHT inducible system.

[0065] FIG. 17 depicts an effect of cryptochrome2 heterodimer orientation on LITE functionality.

[0066] FIG. 18 depicts mGlur2 LITE activity in mouse cortical neuron culture.

[0067] FIG. 19 depicts transduction of primary mouse neurons with LITE AAV vectors.

[0068] FIG. 20 depicts expression of LITE component in vivo.

[0069] FIG. 21 depicts an improved design of the construct where the specific NES peptide sequence used is LDLASLIL (SEQ ID NO: 6).

[0070] FIG. 22 depicts Sox2 mRNA levels in the absence and presence of 40H tamoxifen.

[0071] FIGS. 23A-E depict a Type 11 CRISPR locus from Streptococcus pyogenes SF370 can be reconstituted in mammalian cells to facilitate targeted DSBs of DNA. (A) Engineering of SpCas9 and SpRNase III with NLSs enables import into the mammalian nucleus. (B) Mammalian expression of SpCas9 and SpRNase III are driven by the EF1a promoter, whereas tracrRNA and pre-crRNA array (DR-Spacer-DR) are driven by the U6 promoter. A protospacer (blue highlight) from the human EMX1 locus with PAM is used as template for the spacer in the pre-crRNA array. (C) Schematic representation of base pairing between target locus and EMX1-targeting crRNA. Red arrow indicates putative cleavage site. (D) SURVEYOR assay for SpCas9-mediated indels. (E) An example chromatogram showing a micro-deletion, as well as representative sequences of mutated alleles identified from 187 clonal amplicons. Red dashes, deleted bases; red bases, insertions or mutations. Scale bar=10 μm. FIG. 23B discloses SEQ ID NO: 451, FIG. 23C discloses SEQ ID NOS 452-453, and FIG. 23E discloses SEQ ID NOS 454-461, all respectively, in order of appearance.

[0072] FIGS. 24A-C depict a SpCas9 can be reprogrammed to target multiple genomic loci in mammalian cells. (A) Schematic of the human EMX1 locus showing the location of five protospacers, indicated by blue lines with corresponding PAM in magenta. (B) Schematic of the pre-crRNA:tracrRNA complex (top) showing hybridization between the direct repeat (gray) region of the pre-crRNA and tracrRNA. Schematic of a chimeric RNA design (M. Jinek et al., A programmable dual-RNA-guided DNA endonuclease in adaptive bacterial immunity. Science 337, 816 (Aug. 17, 2012)) (bottom), tracrRNA sequence is shown in red and the 20 bp spacer sequence in blue. (C) SURVEYOR assay comparing the efficacy of Cas9-mediated cleavage at five protospacers in the human EMX1 locus. Each protospacer is targeted using either processed pre-crRNA:tracrRNA complex (crRNA) or chimeric RNA (chiRNA). FIG. 24A discloses SEQ ID NO: 462 and FIG. 24B discloses SEQ ID NOS 463-465, respectively, in order of appearance.

[0073] FIGS. 25A-D depict an evaluation of the SpCas9 specificity and comparison of efficiency with TALENs. (A) EMX1-targeting chimeric crRNAs with single point mutations were generated to evaluate the effects of spacer-protospacer mismatches. (B) SURVEYOR assay comparing the cleavage efficiency of different mutant chimeric RNAs. (C) Schematic showing the design of TALENs targeting EMX1. (D) SURVEYOR gel comparing the efficiency of TALEN and SpCas9 (N=3). FIG. 25A discloses SEQ ID NOS 466-478, respectively, in order of appearance, and FIG. 25C discloses SEQ ID NO: 466.

[0074] FIGS. 26A-G depict applications of Cas9 for homologous recombination and multiplex genome engineering. (A) Mutation of the RuvC I domain converts Cas9 into a nicking enzyme (SpCas9n) (B) Co-expression of EMX1-targeting chimeric RNA with SpCas9 leads to indels, whereas SpCas9n does not (N=3). (C) Schematic representation of the recombination strategy. A repair template is designed to insert restriction sites into EMX1 locus. Primers used to amplify the modified region are shown as red arrows. (D) Restriction fragments length polymorphism gel analysis. Arrows indicate fragments generated by HindIII digestion. (E) Example chromatogram showing successful recombination. (F) SpCas9 can facilitate multiplex genome modification using a crRNA array containing two spacers targeting EMX1 and PVALB. Schematic showing the design of the crRNA array (top). Both spacers mediate efficient protospacer cleavage (bottom). (G) SpCas9 can be used to achieve precise genomic deletion. Two spacers targeting EMX1 (top) mediated a 118 bp genomic deletion (bottom). FIG. 26E discloses SEQ ID NO: 479, FIG. 26F discloses SEQ ID NOS 480-481, and FIG. 26G discloses SEQ ID NOS 482-486, respectively, in order of appearance.

[0075] FIG. 27 depicts a schematic of the type II CRISPR-mediated DNA double-strand break. The type II CRISPR locus from Streptococcus pyogenes SF370 contains a cluster of four genes, Cas9, Cas1, Cas2, and Csn1, as well as two non-coding RNA elements, tracrRNA and a characteristic array of repetitive sequences (direct repeats) interspaced by short stretches of non-repetitive sequences (spacers, 30 bp each) (15-18, 30, 31). Each spacer is typically derived from foreign genetic material (protospacer), and directs the specificity of CRISPR-mediated nucleic acid cleavage. In the target nucleic acid, each protospacer is associated with a protospacer adjacent motif (PAM) whose recognition is specific to individual CRISPR systems (22, 23). The Type 11 CRISPR system carries out targeted DNA double-strand break (DSB) in sequential steps (M. Jinek et al., Science 337, 816 (Aug. 17, 2012); Gasiunas, R, et al. Proc Natl Acad Sci USA 109, E2579 (Sep. 25, 2012); J. E. Garneau et al., Nature 468, 67 (Nov. 4, 2010); R. Sapranauskas et al., Nucleic Acids Res 39, 9275 (November, 2011); A. H. Magadan et al. PLoS One 7, e40913 (2012)). First, the pre-crRNA array and tracrRNA are transcribed from the CRISPR locus. Second, tracrRNA hybridizes to the direct repeats of pre-crRNA and associates with Cas9 as a duplex, which mediates the processing of the pre-crRNA into mature crRNAs containing individual, truncated spacer sequences. Third, the mature crRNA:tracrRNA duplex directs Cas9 to the DNA target consisting of the protospacer and the requisite PAM via heteroduplex formation between the spacer region of the crRNA and the protospacer DNA. Finally, Cas9 mediates cleavage of target DNA upstream of PAM to create a DSB within the protospacer.

[0076] FIGS. 28A-C depict a comparison of different tracrRNA transcripts for Cas9-mediated gene targeting. (A) Schematic showing the design and sequences of two tracrRNA transcripts tested (short and long). Each transcript is driven by a U6 promoter. Transcription start site is marked as +1 and transcription terminator is as indicated. Blue line indicates the region whose reverse-complement sequence is used to generate northern blot probes for tracrRNA detection. (B) SURVEYOR assay comparing the efficiency of hSpCas9-mediated cleavage of the EMX1 locus. Two biological replicas are shown for each tracrRNA transcript. (C) Northern blot analysis of total RNA extracted from 293FT cells transfected with U6 expression constructs carrying long or short tracrRNA, as well as SpCas9 and DR-EMX1(1)-DR. Left and right panels are from 293FT cells transfected without or with SpRNase III respectively. U6 indicate loading control blotted with a probe targeting human U6 snRNA. Transfection of the short tracrRNA expression construct led to abundant levels of the processed form of tracrRNA (˜75 bp) (E. Deltcheva et al., Nature 471, 602 (Mar. 31, 2011)). Very low amounts of long tracrRNA are detected on the Northern blot. As a result of these experiments, Applicants chose to use short tracrRNA for application in mammalian cells. FIG. 28A discloses SEQ ID NOS 487-488, respectively, in order of appearance.

[0077] FIG. 29 depicts a SURVEYOR assay for detection of double strand break-induced micro insertions and deletions (D. Y. Guschin et al. Methods Mol Biol 649, 247 (2010)). Schematic of the SURVEYOR assay used to determine Cas9-mediated cleavage efficiency. First, genomic PCR (gPCR) is used to amplify the Cas9 target region from a heterogeneous population of modified and unmodified cells, and the gPCR products are reannealed slowly to generate heteroduplexes. The reannealed heteroduplexes are cleaved by SURVEYOR nuclease, whereas homoduplexes are left intact. Cas9-mediated cleavage efficiency (% indel) is calculated based on the fraction of cleaved DNA.

[0078] FIG. 30A-B depict a Northern blot analysis of crRNA processing in mammalian cells. (A) Schematic showing the expression vector for a single spacer flanked by two direct repeats (DR-EMX1(1)-DR). The 30 bp spacer targeting the human EMX1 locus protospacer 1 (Table 1) is shown in blue and direct repeats are in shown in gray. Orange line indicates the region whose reversecomplement sequence is used to generate northern blot probes for EMX1(1) crRNA detection. (B) Northern blot analysis of total RNA extracted from 293FT cells transfected with U6 expression constructs carrying DR-EMX1(1)-DR. Left and right panels are from 293FT cells transfected without or with SpRNase III respectively. DR-EMX1(1)-DR was processed into mature crRNAs only in the presence of SpCas9 and short tracrRNA, and was not dependent on the presence of SpRNase III. The mature crRNA detected from transfected 293FT total RNA is ˜33 bp and is shorter than the 39-42 bp mature crRNA from S. pyogenes (E. Deltcheva et al., Nature 471, 602 (Mar. 31, 2011)), suggesting that the processed mature crRNA in human 293FT cells is likely different from the bacterial mature crRNA in S. pyogenes. FIG. 30A discloses SEQ ID NO: 489.

[0079] FIG. 31A-B depict a bicistronic expression vectors for pre-crRNA array or chimeric crRNA with Cas9. (A) Schematic showing the design of an expression vector for the pre-crRNA array. Spacers can be inserted between two BbsI sites using annealed oligonucleotides. Sequence design for the oligonucleotides are shown below with the appropriate ligation adapters indicated. (B) Schematic of the expression vector for chimeric crRNA. The guide sequence can be inserted between two BbsI sites using annealed oligonucleotides. The vector already contains the partial direct repeat (gray) and partial tracrRNA (red) sequences. WPRE, Woodchuck hepatitis virus posttranscriptional regulatory element. FIG. 31A discloses SEQ ID NOS 490-492, and FIG. 31B discloses SEQ ID NOS 493-495, all respectively, in order of appearance.

[0080] FIGS. 32A-B depict a selection of protospacers in the human PVALB and mouse Th loci. Schematic of the human PVALB (A) and mouse Th (B) loci and the location of the three protospacers within the last exon of the PVALB and Th genes, respectively. The 30 bp protospacers are indicated by black lines and the adjacent PAM sequences are indicated by the magenta bar. Protospacers on the sense and anti-sense strands are indicated above and below the DNA sequences respectively. FIGS. 32A-B disclose SEQ ID NOS 496 and 497, respectively.

[0081] FIGS. 33A-C depict occurrences of PAM sequences in the human genome. Histograms of distances between adjacent Streptococcus pyogenes SF370 locus 1 PAM (NGG) (A) and Streptococcus thermophiles LMD9 locus 1 PAM (NNAGAAW) (B) in the human genome. (C) Distances for each PAM by chromosome. Chr, chromosome. Putative targets were identified using both the plus and minus strands of human chromosomal sequences. Given that there may be chromatin, DNA methylation-, RNA structure, and other factors that may limit the cleavage activity at some protospacer targets, it is important to note that the actual targeting ability might be less than the result of this computational analysis.

[0082] FIGS. 34A-D depict type II CRISPR from Streptococcus thermophilus LMD-9 can also function in eukaryotic cells. (A) Schematic of CRISPR locus 2 from Streptococcus thermophilus LMD-9. (B) Design of the expression system for the S. thermphilus CRISPR system. Human codon-optimized hStCas9 is expressed using a constitutive EF1a promoter. Mature versions of tracrRNA and crRNA are expressed using the U6 promoter to ensure precise transcription initiation. Sequences for the mature crRNA and tracrRNA are shown. A single based indicated by the lower case “a” in the crRNA sequence was used to remove the polyU sequence, which serves as a RNA Pol III transcriptional terminator. (C) Schematic showing protospacer and corresponding PAM sequences targets in the human EMX1 locus. Two protospacer sequences are highlighted and their corresponding PAM sequences satisfying the NNAGAAW motif are indicated by magenta lines. Both protospacers are targeting the anti-sense strand. (D) SURVEYOR assay showing StCas9-mediated cleavage in the target locus. RNA guide spacers 1 and 2 induced 14% and 6.4% respectively. Statistical analysis of cleavage activity across biological replica at these two protospacer sites can be found in Table 1. FIG. 34B discloses SEQ ID NOS 498-499, respectively, in order of appearance, and FIG. 34C discloses SEQ ID NO: 500.

[0083] FIG. 35 depicts an example of an AAV-promoter-TALE-effector construct, where hSyn=human synapsin 1 promoter, N+136=TALE N-term, AA+136 truncation, C63=TALE C-term, AA+63 truncation, vp=VP64 effector domain, GFP=green fluorescent protein, WPRE=Woodchuck Hepatitis Virus Posttranscriptional Regulatory Element, bGH=bovine growth hormone polyA, ITR=AAV inverted terminal repeat and AmpR=ampicillin resistance gene.

[0084] FIG. 36A-C depict design and optimization of the LITE system. (a) A TALE DNA-binding domain is fused to CRY2 and a transcriptional effector domain is fused to CIB1. In the inactive state, TALE-CRY2 binds the promoter region of the target gene while CIB1-effector remains unbound in the nucleus. The VP64 transcriptional activator is shown above. Upon illumination with blue light, TALE-CRY2 and CIB1-effector rapidly dimerize, recruiting CIB1-effector to the target promoter. The effector in turn modulates transcription of the target gene. (b) Light-dependent upregulation of the endogenous target Neurog2 mRNA with LITEs containing functional truncations of its light-sensitive binding partners. LITE-transfected Neuro-2a cells were stimulated for 24 h with 466 nm light at an intensity of 5 mW/cm² and a duty cycle of 7% (1 s pulses at 0.066 Hz). (c) Time course of light-dependent Neurog2 upregulation by TALE-CRY2PHR and CIB1-VP64 LITEs. LITE-transfected Neuro-2a cells were stimulated with 466 nm light at an intensity of 5 mW/cm² and a duty cycle of 7% (1 s pulses at 0.066 Hz) and decrease of Neurog2 mRNA levels after 6 h of light stimulation. All Neurog2 mRNA levels were measured relative to expressing GFP control cells (mean±s.e.m.; n=3-4) (*, p<0.05; and ***, p<0.001). FIG. 36A discloses SEQ ID NO: 20.

[0085] FIG. 37A-F depict in vitro and in vivo AAV-mediated TALE delivery targeting endogenous loci in neurons. (a) General schematic of constitutive TALE transcriptional activator packaged into AAV. Effector domain VP64 highlighted, hSyn: human synapsin promoter; 2A: foot-and-mouth disease-derived 2A peptide; WPRE: woodchuck hepatitis post-transcriptional response element; bGH pA: bovine growth hormone poly-A signal. (b) Representative images showing transduction with AAV-TALE-VP64 construct from (a) in primary cortical neurons. Cells were stained for GFP and neuronal marker NeuN. Scale bars=25 μm. (c) AAV-TALE-VP64 constructs targeting a variety of endogenous loci were screened for transcriptional activation in primary cortical neurons (*, p<0.05; **, p<0.01; ***, p<0.001). (d) Efficient delivery of TALE-VP64 by AAV into the ILC of mice. Scale bar=100 μm. (Cg1=cingulate cortex, PLC=prelimbic cortex, ILC=infralimbic cortex). (e) Higher magnification image of efficient transduction of neurons in ILC. (f) Grn2 mRNA upregulation by TALE-VP64 in vivo in ILC (mean±s.e.m.; n=3 animals per condition), measured using a 300 μm tissue punch.

[0086] FIGS. 38A-I depict LITE-mediated optogenetic modulation of endogenous transcription in primary neurons and in vivo. (a) AAV-LITE activator construct with switched CRY2PHR and CIB1 architecture. (b) Representative images showing co-transduction of AAV-delivered LITE constructs in primary neurons. Cells were stained for GFP, HA-tag, and DAPI. (Scale bars=25 μm). (c) Light-induced activation of Grm2 expression in primary neurons after 24 h of stimulation with 0.8% duty cycle pulsed 466 nm light (250 ms pulses at 0.033 Hz or 500 ms pulses at 0.016 Hz; 5 mW/cm²). (d) Upregulation of Grn2 mRNA in primary cortical neurons with and without light stimulation at 4 h and 24 h time points. Expression levels are shown relative to neurons transduced with GFP only. (e) Quantification of mGluR2 protein levels in GFP only control transductions, unstimulated neurons with LITEs, and light-stimulated neurons with LITEs. A representative western blot is shown with 0-tubulin-III as a loading control. (f) Schematic showing transduction of ILC with the LITE system, the optical fiber implant, and the 0.35 mm diameter brain punch used for tissue isolation. (g) Representative images of ILC co-transduced with both LITE components. Stains are shown for HA-tag (red), GFP (green), and DAPI (blue). (Scale bar=25 μm). (h) Light-induced activation of endogenous Grn2 expression using LITEs transduced into ILC. **, p<0.05; data generated from 4 different mice for each experimental condition. (i) Fold increases and light induction of Neurog2 expression using LITE1.0 and optimized LITE 2.0. LITE2.0 provides minimal background while maintaining a high level of activation. NLS_{α-importin} and NLS_{SV40}, nuclear localization signal from α-importin and simian virus 40 respectively; GS, Gly-Ser linker; NLS*, mutated NLS where the indicated residues have been substituted with Ala to prevent nuclear localization activity; A318-334; deletion of a higher plant helix-loop-helix transcription factor homology region. FIG. 38I discloses SEQ ID NO: 501.

[0087] FIG. 39A-H depict TALE- and LITE-mediated epigenetic modifications (a) Schematic of LITE epigenetic modifiers (epiLITE). (b) Schematic of engineered epigenetic transcriptional repressor SID4X within an AAV vector, phiLOV2.1 (330 bp) was used as a fluorescent marker rather than GFP (800 bp) to ensure efficient AAV packaging. (c) epiLITE-mediated repression of endogenous Grm2 expression in primary cortical neurons with and without light stimulation. Fold down regulation is shown relative to neurons transduced with GFP alone. (d) epiLITE-mediated decrease in H3K9 histone residue acetylation at the Grm2 promoter with and without light-stimulation. (e, f) Fold reduction of Grm2 mRNA by epiTALE-methyltransferases (epiTALE-KYP, -TgSET8, and -NUE), and corresponding enrichment of histone methylation marks H3K9me1. H4K20me3, and H3K27me3 at the Grm2 promoter. (g, h) Fold reduction of Grm2 mRNA by epiTALE histone deacetylases (epiTALE-HDAC8, -RPD3, -Sir2a, and -Sin3a), and corresponding decreases in histone residue acetylation marks H4K8Ac and H3K9Ac at the Grm2 promoter. Values shown in all panels are mean±s.e.m., n=3-4.

[0088] FIG. 40 depicts an illustration of the absorption spectrum of CRY2 in vitro. Cryptochrome 2 was optimally activated by 350-475 nm light¹. A sharp drop in absorption and activation was seen for wavelengths greater than 480 nm. Spectrum was adapted from Banerjee, R, et al. The Signaling State of Arabidopsis Cryptochrome 2 Contains Flavin Semiquinone. Journal of Biological Chemistry 282, 14916-14922, doi: 10.1074/jbc.M700616200 (2007).

[0089] FIG. 41 depicts an impact of illumination duty cycle on LITE-mediated gene expression. Varying duty cycles (illumination as percentage of total time) were used to stimulate 293FT cells expressing LITEs targeting the KLF4 gene, in order to investigate the effect of duty cycle on LITE activity. KLF4 expression levels were compared to cells expressing GFP only. Stimulation parameters were: 466 nm, 5 mW/cm² for 24 h. Pulses were performed at 0.067 Hz with the following durations: 1.7%=0.25 s pulse, 7%=1 s pulse, 27%=4 s pulse, 100%=constant illumination. (mean±s.e.m.; n=3-4).

[0090] FIGS. 42A-B depict an impact of light intensity on LITE-mediated gene expression and cell survival. (a) The transcriptional activity of CRY2PHR::CIB1 LITE was found to vary according to the intensity of 466 nm blue light. Neuro 2a cells were stimulated for 24 h hours at a 7% duty cycle (1s pulses at 0.066 Hz) (b) Light-induced toxicity measured as the percentage of cells positive for red-fluorescent ethidium homodimer-1 versus calcein-positive cells. All Neurog2 mRNA levels were measured relative to cells expressing GFP only (mean±s.e.m.; n=3-4).

[0091] FIG. 43 depicts an impact of transcriptional activation domains on LITE-mediated gene expression. Neurog2 up-regulation with and without light by LITEs using different transcriptional activation domains (VP16, VP64, and p65). Neuro-2a cells transfected with LITE were stimulated for 24 h with 466 nm light at an intensity of 5 mW/cm² and a duty cycle of 7% (1 s pulses at 0.066 Hz). (mean±s.e.m.; n=3-4)

[0092] FIGS. 44A-C depict chemical induction of endogenous gene transcription. (a) Schematic showing the design of a chemical inducible two hybrid TALE system based on the abscisic acid (ABA) receptor system. ABI and PYL dimerize upon the addition of ABA and dissociates when ABA is withdrawn. (b) Time course of ABA-dependent Neurog2 up-regulation. 250 μM of ABA was added to HEK 293FT cells expressing TALE(Neurog2)-ABI and PYL-VP64. Fold mRNA increase was measured at the indicated time points after the addition of ABA. (c) Decrease of Neurog2 mRNA levels after 24 h of ABA stimulation. All Neurog2 mRNA levels were measured relative to expressing GFP control cells (mean±s.e.m.; n=3-4). FIG. 44A discloses SEQ ID NOS 27 and 27.

[0093] FIGS. 45A-C depict AAV supernatant production. (a) Lentiviral and AAV vectors carrying GFP were used to test transduction efficiency. (b) Primary embryonic cortical neurons were transduced with 300 and 250 μL supernatant derived from the same number of AAV or lentivirus-transfected 293FT cells. Representative images of GFP expression were collected at 7 d.p.i. Scale bars=50 μm. (c) The depicted process was developed for the production of AAV supernatant and subsequent transduction of primary neurons. 293FT cells were transfected with an AAV vector carrying the gene of interest, the AAV1 serotype packaging vector (pAAV1), and helper plasmid (pDF6) using PEI. 48 h later, the supernatant was harvested and filtered through a 0.45 μm PVDF membrane. Primary neurons were then transduced with supernatant and remaining aliquots were stored at −80° C. Stable levels of AAV construct expression were reached after 5-6 days. AAV supernatant production following this process can be used for production of up to 96 different viral constructs in 96-well format (employed for TALE screen in neurons shown in FIG. 37C).

[0094] FIG. 46 depicts selection of TALE target sites guided by DNaseI-sensitive chromatin regions. High DNaseI sensitivity based on mouse cortical tissue data from ENCODE (http:/genome.ucsc.edu) was used to identify open chromatin regions. The peak with the highest amplitude within the region 2 kb upstream of the transcriptional start site was selected for targeting. TALE binding targets were then picked within a 200 bp region at the center of the peak.

[0095] FIG. 47 depicts an impact of light duty cycle on primary neuron health. The effect of light stimulation on primary cortical neuron health was compared for duty cycles of 7%, 0.8%, and no light conditions. Calcein was used to evaluate neuron viability. Bright-field images were captured to show morphology and cell integrity. Primary cortical neurons were stimulated with the indicated duty cycle for 24 h with 5 mW/cm² of 466 nm light. Representative images, scale bar=50 μm. Pulses were performed in the following manner: 7% duty cycle=1 s pulse at 0.067 Hz, 0.8% duty cycle=0.5 s pulse at 0.0167 Hz.

[0096] FIG. 48 depicts an image of a mouse during optogenetic stimulation. An awake, freely behaving, LITE-injected mouse is pictured with a stereotactically implanted cannula and optical fiber.

[0097] FIG. 49 depicts co-transduction efficiency of LITE components by AAV1/2 in mouse infralimbic cortex. Cells transduced by TALE(Grm2)-CIB1 alone, CRY2PHR-VP64 alone, or co-transduced were calculated as a percentage of all transduced cells.

[0098] FIG. 50 depicts a contribution of individual LITE components to baseline transcription modulation. Grm2 mRNA levels were determined in primary neurons transfected with individual LITE components. Primary neurons expressing Grm2 TALE_{—}1-CIB1 alone led to a similar increase in Grm2 mRNA levels as unstimulated cells expressing the complete LITE system. (mean±s.e.m.; n=3-4).

[0099] FIG. 51A-C depicts effects of LITE Component Engineering on Activation, Background Signal, and Fold Induction. Protein modifications were employed to find LITE components resulting in reduced background transcriptional activation while improving induction ratio by light. Protein alterations are discussed in detail below. In brief, nuclear localization signals and mutations in an endogenous nuclear export signal were used to improve nuclear import of the CRY2PHR-VP64 component. Several variations of CIB1 intended to either reduce nuclear localization or CIB1 transcriptional activation were pursued in order to reduce the contribution of the TALE-CIB1 component to background activity. The results of all combinations of CRY2PHR-VP64 and TALE-CIB1 which were tested are shown above. The table to the left of the bar graphs indicates the particular combination of domains/mutations used for each condition. Each row of the table and bar graphs contains the component details, Light/No light activity, and induction ratio by light for the particular CRY2PHR/CIB1 combination. Combinations that resulted in both decreased background and increased fold induction compared to LITE 1.0 are highlighted in green in the table column marked “+” (t-test p<0.05). CRY2PHR-VP64 Constructs: Three new constructs were designed with the goal of improving CRY2PHR-VP64 nuclear import. First, the mutations L70A and L74A within a predicted endogenous nuclear export sequence of CRY2PHR were induced to limit nuclear export of the protein (referred to as ‘*’ in the Effector column). Second, the α-importin nuclear localization sequence was fused to the N-terminus of CRY2PHR-VP64 (referred to as ‘A’ in the Effector column). Third, the SV40 nuclear localization sequence was fused to the C-terminus of CRY2PHR-VP64 (referred to as ‘P’ in the Effector column). TALE-CIB1 Linkers: The SV40 NLS linker between TALE and CIB1 used in LITE 1.0 was replaced with one of several linkers designed to increase nuclear export of the TALE-CIB1 protein (The symbols used in the CIB1 Linker column are shown in parentheses): a flexible glycine-serine linker (G), an adenovirus type 5 E1B nuclear export sequence (W), an HIV nuclear export sequence (M), a MAPKK nuclear export sequence (K), and a PTK2 nuclear export sequence (P). NLS* Endogenous CIB1 Nuclear Localization Sequence Mutation: A nuclear localization signal exists within the wild type CIB1 sequence. This signal was mutated in NLS* constructs at K92A, R93A, K105A, and K106A in order to diminish TALE-CIB1 nuclear localization (referred to as ‘N’ in the NLS* column). ΔCIB1 Transcription Factor Homology Deletions: In an effort to eliminate possible basal CIB1 transcriptional activation, deletion constructs were designed in which regions of high homology to basic helix-loop-helix transcription factors in higher plants were removed. These deleted regions consisted of Δaa230-256, Δaa276-307, Δaa308-334 (referred to as ‘1’‘2’ and ‘3’ in the ΔCIB1 column). In each case, the deleted region was replaced with a 3 residue GGS link. NES Insertions into CIB1: One strategy to facilitate light-dependent nuclear import of TALE-CIB1 was to insert an NES in CIB1 at its dimerization interface with CRY2PHR such that the signal would be concealed upon binding with CRY2PHR. To this end, an NES was inserted at different positions within the known CRY2 interaction domain CIBN (aa 1-170). The positions are as follows (The symbols used in the NES column are shown in parentheses): aa28 (1), aa52 (2), aa73 (3), aa120 (4), aa140 (5), aa160 (6). *bHLH basic Helix-Loop-Helix Mutation: To reduce direct CIB1-DNA interactions, several basic residues of the basic helix-loop-helix region in CIB1 were mutated. The following mutations are present in all *bHLH constructs (referred to as ‘B’ in the *bHLH column of FIG. 51): R175A, G176A, R187A, and R189A. FIG. 51 discloses SEQ ID NOS 502, 501, and 503-504, respectively, in order of appearance.

[0100] FIG. 52A-B depicts an illustration of light mediated co-dependent nuclear import of TALE-CIB1 (a) In the absence of light, the TALE-CIB1 LITE component resides in the cytoplasm due to the absence of a nuclear localization signal, NLS (or the addition of a weak nuclear export signal, NES). The CRY2PHR-VP64 component containing a NLS on the other hand is actively imported into the nucleus on its own. (b) In the presence of blue light, TALE-CIB1 binds to CRY2PHR. The strong NLS present in CRY2PHR-VP64 now mediates nuclear import of the complex of both LITE components, enabling them to activate transcription at the targeted locus.

[0101] FIG. 53 depicts notable LITE 1.9 combinations. In addition to the LITE 2.0 constructs, several CRY2PHR-VP64::TALE-CIB1 combinations from the engineered LITE component screen were of particular note. LITE 1.9.0, which combined the α-importin NLS effector construct with a mutated endogenous NLS and A276-307 TALE-CIB1 construct, exhibited an induction ratio greater than 9 and an absolute light activation of more than 180. LITE 1.9.1, which combined the unmodified CRY2PHR-VP64 with a mutated NLS, A318-334, AD5 NES TALE-CIB1 construct, achieved an induction ratio of 4 with a background activation of 1.06. A selection of other LITE 1.9 combinations with background activations lower than 2 and induction ratios ranging from 7 to 12 were also highlighted.

[0102] FIGS. 54A-D depict TALE SID4X repressor characterization and application in neurons, a) A synthetic repressor was constructed by concatenating 4 SID domains (SID4X). To identify the optimal TALE-repressor architecture, SID or SID4X was fused to a TALE designed to target the mouse p11 gene. (b) Fold decrease in p11 mRNA was assayed using qRT-PCR. (c) General schematic of constitutive TALE transcriptional repressor packaged into AAV. Effector domain SID4X is highlighted, hSyn: human synapsin promoter; 2A: foot-and-mouth disease-derived 2A peptide; WPRE: woodchuck hepatitis post-transcriptional response element; bGH pA: bovine growth hormone poly-A signal, phiLOV2.1 (330 bp) was chosen as a shorter fluorescent marker to ensure efficient AAV packaging. (d) 2 TALEs targeting the endogenous mouse loci Grm5, and Grm2 were fused to SID4X and virally transduced into primary neurons. The target gene down-regulation via SID4X is shown for each TALE relative to levels in neurons expressing GFP only. (mean±s.e.m.; n=3-4). FIG. 54A discloses SEQ ID NO: 450.

[0103] FIGS. 55A-B depict a diverse set of epiTALEs mediate transcriptional repression in neurons and Neuro2a cells a) A total of 24 Grm2 targeting TALEs fused to different histone effector domains were transduced into primary cortical mouse neurons using AAV. Grm2 mRNA levels were measured using RT-qPCR relative to neurons transduced with GFP only. * denotes repression with p<0.05, b) A total of 32 epiTALEs were transfected into Neuro2A cells. 20 of them mediated significant repression of the targeted Neurog2 locus (*=p<0.05).

[0104] FIGS. 56A-D depict epiTALEs mediating transcriptional repression along with histone modifications in Neuro 2A cells (a) TALEs fused to histone deacetylating epigenetic effectors NcoR and SIRT3 targeting the murine Neurog2 locus in Neuro 2A cells were assayed for repressive activity on Neurog2 transcript levels. (b) ChIP RT-qPCR showing a reduction in H3K9 acetylation at the Neurog2 promoter for NcoR and SIRT3 epiTALEs. (c) The epigenetic effector PHF19 with known histone methyltransferase binding activity was fused to a TALE targeting Neurog2 mediated repression of Neurog2 mRNA levels. (d) ChIP RT-qPCR showing an increase in H3K27me3 levels at the Neurog2 promoter for the PHF19 epiTALE.

[0105] FIGS. 57A-G depict RNA-guided DNA binding protein Cas9 can be used to target transcription effector domains to specific genomic loci. (a) The RNA-guided nuclease Cas9 from the type II Streptococcus pyogenes CRISPR/Cas system can be converted into a nucleolytically-inactive RNA-guided DNA binding protein (Cas9**) by introducing two alanine substitutions (D10A and H840A). Schematic showing that a synthetic guide RNA (sgRNA) can direct Cas9**-effector fusion to a specific locus in the human genome. The sgRNA contains a 20 bp guide sequence at the 5′ end which specifies the target sequence. On the target genomic DNA, the 20 bp target site needs to be followed by a 5′-NGG PAM motif. (b, c) Schematics showing the sgRNA target sites in the human KLF4 and SOX2 loci respectively. Each target site is indicated by the blue bar and the corresponding PAM sequence is indicated by the magenta bar. (d, e) Schematics of the Cas9**-VP64 transcription activator and SID4X-Cas9** transcription repressor constructs. (f, g) Cas9**-VP64 and SID4X-Cas9** mediated activation of KLF4 and repression of SOX2 respectively. All mRNA levels were measured relative to GFP mock transfected control cells (mean±s.e.m.; n=3). FIG. 57A discloses SEQ ID NOS 508-509, FIG. 57B discloses SEQ ID NO: 510, and FIG. 57C discloses SEQ ID NOS 511-513, all respectively, in order of appearance.

[0106] FIG. 58 depicts 6 TALEs which were designed, with two TALEs targeting each of the endogenous mouse loci Grm5, Grm2a, and Grm2. TALEs were fused to the transcriptional activator domain VP64 or the repressor domain SID4X and virally transduced into primary neurons. Both the target gene upregulation via VP64 and downregulation via SID4X are shown for each TALE relative to levels in neurons expressing GFP only. FIG. 58 discloses SEQ ID NOS 127, 505, 129, 506, 507, and 126, respectively, in order of appearance.

[0107] FIGS. 59A-B depict (A) LITE repressor construct highlighting SID4X repressor domain. (B) Light-induced repression of endogenous Grm2 expression in primary cortical neurons using Grm2 TI-LITE and Grm2 T2-LITE. Fold downregulation is shown relative to neurons transduced with GFP only (mean±s.e.m.; n=3-4 for all subpanels).

[0108] FIGS. 60A-B depict exchanging CRY2PHR and CIB1 components. (A) TALE-CIB1::CRY2PHR-VP64 was able to activate Ngn2 at higher levels than TALE-CRY2PHR::CIB1-VP64. (B) Fold activation ratios (light versus no light) ratios of Ngn2 LITEs show similar efficiency for both designs. Stimulation parameters were the same as those used in FIG. 36B.

[0109] FIG. 61 depicts Tet Cas9 vector designs for inducible Cas9.

[0110] FIG. 62 depicts a vector and EGFP expression in 293FT cells after Doxycycline induction of Cas9 and EGFP.

[0111] FIG. 63A-F illustrates an exemplary CRISPR system, a possible mechanism of action, an example adaptation for expression in eukmyotic cells, and results of tests assessing nuclear localization and CRISPR activity. FIG. 63 discloses SEQ ID NOS 544-553, respectively, in order of appearance.

[0112] FIG. 64A-C illustrates an exemplary expression cassette for expression of CRISPR system elements in eukaryotic cells, predicted structures of example guide sequences, and CRISPR system activity as measured in eukaryotic and prokaryotic cells. FIG. 64 discloses SEQ ID NOS 554-563, respectively, in order of appearance.

[0113] FIG. 65 provides a table of protospacer sequences and summarizes modification efficiency results for protospacer targets designed based on exemplary S. pyogenes and S. thermophilus CRISPR systems with corresponding PAMs against loci in human and mouse genomes. Cells were transfected with Cas9 and either pre-crRNA/tracrRNA or chimeric RNA, and analyzed 72 hours after transfection. Percent indels are calculated based on Surveyor assay results from indicated cell lines (N=3 for all protospacer targets, errors are S.E.M., N.D. indicates not detectable using the Surveyor assay, and N.T. indicates not tested in this study). FIG. 65 discloses SEQ ID NOS 564-579, respectively, in order of appearance.

[0114] FIG. 66A-D illustrates a bacterial plasmid transformation interference assay, expression cassettes and plasmids used therein, and transformation efficiencies of cells used therein. FIG. 66 discloses SEQ ID NOS 580-582, respectively, in order of appearance.

[0115] FIG. 67A-D illustrates an exemplary CRISPR system, an example adaptation for expression in eukaryotic cells, and results of tests assessing CRISPR activity. FIG. 67 discloses SEQ ID NOS 583-586, respectively, in order of appearance.

[0116] FIG. 68 provides a table of sequences for primers and probes used for Surveyor, RFLP, genomic sequencing, and Northern blot assays. FIG. 68 discloses SEQ ID NOS 587-589, respectively, in order of appearance.

### DETAILED DESCRIPTION OF THE INVENTION

[0117] The term “nucleic acid” or “nucleic acid sequence” refers to a deoxyribonucleic or ribonucleic oligonucleotide in either single- or double-stranded form. The term encompasses nucleic acids, i.e., oligonucleotides, containing known analogues of natural nucleotides. The term also encompasses nucleic-acid-like structures with synthetic backbones, see, e.g., Eckstein, 1991; Baserga et al., 1992; Milligan, 1993; WO 97/03211; WO 96/39154; Mata, 1997; Strauss-Soukup, 1997; and Samstag, 1996.

[0118] As used herein, “recombinant” refers to a polynucleotide synthesized or otherwise manipulated in vitro (e.g., “recombinant polynucleotide”), to methods of using recombinant polynucleotides to produce gene products in cells or other biological systems, or to a polypeptide (“recombinant protein”) encoded by a recombinant polynucleotide. “Recombinant means” encompasses the ligation of nucleic acids having various coding regions or domains or promoter sequences from different sources into an expression cassette or vector for expression of, e.g., inducible or constitutive expression of polypeptide coding sequences in the vectors of invention.

[0119] The term “heterologous” when used with reference to a nucleic acid, indicates that the nucleic acid is in a cell or a virus where it is not normally found in nature; or, comprises two or more subsequences that are not found in the same relationship to each other as normally found in nature, or is recombinantly engineered so that its level of expression, or physical relationship to other nucleic acids or other molecules in a cell, or structure, is not normally found in nature. A similar term used in this context is “exogenous”. For instance, a heterologous nucleic acid is typically recombinantly produced, having two or more sequences from unrelated genes arranged in a manner not found in nature; e.g., a human gene operably linked to a promoter sequence inserted into an adenovirus-based vector of the invention. As an example, a heterologous nucleic acid of interest may encode an immunogenic gene product, wherein the adenovirus is administered therapeutically or prophylactically as a carrier or drug-vaccine composition. Heterologous sequences may comprise various combinations of promoters and sequences, examples of which are described in detail herein.

[0120] A “therapeutic ligand” may be a substance which may bind to a receptor of a target cell with therapeutic effects.

[0121] A “therapeutic effect” may be a consequence of a medical treatment of any kind, the results of which are judged by one of skill in the field to be desirable and beneficial. The “therapeutic effect” may be a behavioral or physiologic change which occurs as a response to the medical treatment. The result may be expected, unexpected, or even an unintended consequence of the medical treatment. A “therapeutic effect” may include, for example, a reduction of symptoms in a subject suffering from infection by a pathogen.

[0122] A “target cell” may be a cell in which an alteration in its activity may induce a desired result or response. As used herein, a cell may be an in vitro cell. The cell may be an isolated cell which may not be capable of developing into a complete organism.

[0123] A “ligand” may be any substance that binds to and forms a complex with a biomolecule to serve a biological purpose. As used herein. “ligand” may also refer to an “antigen” or “immunogen”. As used herein “antigen” and “immunogen” are used interchangeably.

[0124] “Expression” of a gene or nucleic acid encompasses not only cellular gene expression, but also the transcription and translation of nucleic acid(s) in cloning systems and in any other context.

[0125] As used herein, a “vector” is a tool that allows or facilitates the transfer of an entity from one environment to another. By way of example, some vectors used in recombinant DNA techniques allow entities, such as a segment of DNA (such as a heterologous DNA segment, such as a heterologous cDNA segment), to be transferred into a target cell. The present invention comprehends recombinant vectors that may include viral vectors, bacterial vectors, protozoan vectors, DNA vectors, or recombinants thereof.

[0126] With respect to exogenous DNA for expression in a vector (e.g., encoding an epitope of interest and/or an antigen and/or a therapeutic) and documents providing such exogenous DNA, as well as with respect to the expression of transcription and/or translation factors for enhancing expression of nucleic acid molecules, and as to terms such as “epitope of interest”, “therapeutic”, “immune response”, “immunological response”, “protective immune response”, “immunological composition”, “immunogenic composition”, and “vaccine composition”, inter alia, reference is made to U.S. Pat. No. 5,990,091 issued Nov. 23, 1999, and WO 98/00166 and WO 99/60164, and the documents cited therein and the documents of record in the prosecution of that patent and those PCT applications; all of which are incorporated herein by reference. Thus, U.S. Pat. No. 5,990,091 and WO 98/00166 and WO 99/60164 and documents cited therein and documents of record in the prosecution of that patent and those PCT applications, and other documents cited herein or otherwise incorporated herein by reference, may be consulted in the practice of this invention; and, all exogenous nucleic acid molecules, promoters, and vectors cited therein may be used in the practice of this invention. In this regard, mention is also made of U.S. Pat. Nos. 6,706,693; 6,716,823; 6,348,450; U.S. patent application Ser. Nos. 10/424,409; 10/052,323; 10/116,963; 10/346,021; and WO 99/08713, published Feb. 25, 1999, from PCT/US98/16739.

[0127] Aspects of the invention comprehend the TALE and CRISPR-Cas systems of the invention being delivered into an organism or a cell or to a locus of interest via a delivery system. One means of delivery is via a vector, wherein the vector is a viral vector, such as a lenti- or baculo- or preferably adeno-viral/adeno-associated viral vectors, but other means of delivery are known (such as yeast systems, microvesicles, gene guns/means of attaching vectors to gold nanoparticles) and are provided. In some embodiments, one or more of the viral or plasmid vectors may be delivered via nanoparticles, exosomes, microvesciles, or a gene-gun.

[0128] As used herein, the terms “drug composition” and “drug”, “vaccinal composition”. “vaccine”, “vaccine composition”, “therapeutic composition” and “therapeutic-immunologic composition” cover any composition that induces protection against an antigen or pathogen. In some embodiments, the protection may be due to an inhibition or prevention of infection by a pathogen. In other embodiments, the protection may be induced by an immune response against the antigen(s) of interest, or which efficaciously protects against the antigen; for instance, after administration or injection into the subject, elicits a protective immune response against the targeted antigen or immunogen or provides efficacious protection against the antigen or immunogen expressed from the inventive adenovirus vectors of the invention. The term “pharmaceutical composition” means any composition that is delivered to a subject. In some embodiments, the composition may be delivered to inhibit or prevent infection by a pathogen.

[0129] A “therapeutically effective amount” is an amount or concentration of the recombinant vector encoding the gene of interest, that, when administered to a subject, produces a therapeutic response or an immune response to the gene product of interest.

[0130] The term “viral vector” as used herein includes but is not limited to retroviruses, adenoviruses, adeno-associated viruses, alphaviruses, and herpes simplex virus.

[0131] The term“polynucleotide”, “nucleotide”, “nucleotide sequence”, “nucleic acid” and “oligonucleotide” are used interchangeably. They refer to a polymeric form of nucleotides of any length, either deoxyribonucleotides or ribonucleotides, or analogs thereof. Polynucleotides may have any three dimensional structure, and may perform any function, known or unknown. The following are non limiting examples of polynucleotides: coding or non-coding regions of a gene or gene fragment, loci (locus) defined from linkage analysis, exons, introns, messenger RNA (mRNA), transfer RNA, ribosomal RNA, short interfering RNA (siRNA), short-hairpin RNA (shRNA), micro-RNA (miRNA), ribozymes, cDNA, recombinant polynucleotides, branched polynucleotides, plasmids, vectors, isolated DNA of any sequence, isolated RNA of any sequence, nucleic acid probes, and primers. A polynucleotide may comprise one or more modified nucleotides, such as methylated nucleotides and nucleotide analogs. If present, modifications to the nucleotide structure may be imparted before or after assembly of the polymer. The sequence of nucleotides may be interrupted by non nucleotide components. A polynucleotide may be further modified after polymerization, such as by conjugation with a labeling component.

[0132] “Complementarity” refers to the ability of a nucleic acid to form hydrogen bond(s) with another nucleic acid sequence by either traditional Watson-Crick or other non-traditional types. A percent complementarity indicates the percentage of residues in a nucleic acid molecule which can form hydrogen bonds (e.g., Watson-Crick base pairing) with a second nucleic acid sequence (e.g., 5, 6, 7, 8, 9, 10 out of 10 being 50%, 60%, 70%, 80%, 90%, and 100% complementary). “Perfectly complementary” means that all the contiguous residues of a nucleic acid sequence will hydrogen bond with the same number of contiguous residues in a second nucleic acid sequence. “Substantially complementary” as used herein refers to a degree of complementarity that is at least 60%, 65%, 70%, 75%, 80%, 85%, 90%, 95%, 97%, 98%, 99%, or 100% over a region of 8, 9, 10, 11, 12, 13, 14, 15, 16, 17, 18, 19, 20, 21, 22, 23, 24, 25, 30, 35, 40, 45, 50, or more nucleotides, or refers to two nucleic acids that hybridize under stringent conditions.

[0133] As used herein, “stringent conditions” for hybridization refer to conditions under which a nucleic acid having complementarity to a target sequence predominantly hybridizes with the target sequence, and substantially does not hybridize to non-target sequences. Stringent conditions are generally sequence-dependent, and vary depending on a number of factors. In general, the longer the sequence, the higher the temperature at which the sequence specifically hybridizes to its target sequence. Non-limiting examples of stringent conditions are described in detail in Tijssen (1993), Laboratory Techniques In Biochemistry And Molecular Biology-Hybridization With Nucleic Acid Probes Part I, Second Chapter “Overview of principles of hybridization and the strategy of nucleic acid probe assay”, Elsevier, N.Y.

[0134] “Hybridization” refers to a reaction in which one or more polynucicotides react to form a complex that is stabilized via hydrogen bonding between the bases of the nucleotide residues. The hydrogen bonding may occur by Watson Crick base pairing, Hoogstein binding, or in any other sequence specific manner. The complex may comprise two strands forming a duplex structure, three or more strands forming a multi stranded complex, a single self hybridizing strand, or any combination of these. A hybridization reaction may constitute a step in a more extensive process, such as the initiation of PCR, or the cleavage of a polynucleotide by an enzyme. A sequence capable of hybridizing with a given sequence is referred to as the “complement” of the given sequence.

[0135] As used herein, “expression” refers to the process by which a polynucleotide is transcribed from a DNA template (such as into and mRNA or other RNA transcript) and/or the process by which a transcribed mRNA is subsequently translated into peptides, polypeptides, or proteins. Transcripts and encoded polypeptides may be collectively referred to as “gene product.” If the polynucleotide is derived from genomic DNA, expression may include splicing of the mRNA in a eukaryotic cell.

[0136] The terms “polypeptide”, “peptide” and “protein” are used interchangeably herein to refer to polymers of amino acids of any length. The polymer may be linear or branched, it may comprise modified amino acids, and it may be interrupted by non amino acids. The terms also encompass an amino acid polymer that has been modified; for example, disulfide bond formation, glycosylation, lipidation, acetylation, phosphorylation, or any other manipulation, such as conjugation with a labeling component. As used herein the term “amino acid” includes natural and/or unnatural or synthetic amino acids, including glycine and both the D or L optical isomers, and amino acid analogs and peptidomimetics.

[0137] The terms “subject,” “individual,” and “patient” are used interchangeably herein to refer to a vertebrate, preferably a mammal, more preferably a human. Mammals include, but are not limited to, murines, simians, humans, farm animals, sport animals, and pets. Tissues, cells and their progeny of a biological entity obtained in vivo or cultured in vitro are also encompassed.

[0138] The terms “therapeutic agent”, “therapeutic capable agent” or “treatment agent” are used interchangeably and refer to a molecule or compound that confers some beneficial effect upon administration to a subject. The beneficial effect includes enablement of diagnostic determinations; amelioration of a disease, symptom, disorder, or pathological condition; reducing or preventing the onset of a disease, symptom, disorder or condition; and generally counteracting a disease, symptom, disorder or pathological condition.

[0139] As used herein, “treatment” or “treating,” or “palliating” or “ameliorating” are used interchangeably. These terms refer to an approach for obtaining beneficial or desired results including but not limited to a therapeutic benefit and/or a prophylactic benefit. By therapeutic benefit is meant any therapeutically relevant improvement in or effect on one or more diseases, conditions, or symptoms under treatment. For prophylactic benefit, the compositions may be administered to a subject at risk of developing a particular disease, condition, or symptom, or to a subject reporting one or more of the physiological symptoms of a disease, even though the disease, condition, or symptom may not have yet been manifested.

[0140] The term “effective amount” or “therapeutically effective amount” refers to the amount of an agent that is sufficient to effect beneficial or desired results. The therapeutically effective amount may vary depending upon one or more of: the subject and disease condition being treated, the weight and age of the subject, the severity of the disease condition, the manner of administration and the like, which can readily be determined by one of ordinary skill in the art. The term also applies to a dose that will provide an image for detection by any one of the imaging methods described herein. The specific dose may vary depending on one or more of: the particular agent chosen, the dosing regimen to be followed, whether it is administered in combination with other compounds, timing of administration, the tissue to be imaged, and the physical delivery system in which it is carried.

[0141] The practice of the present invention employs, unless otherwise indicated, conventional techniques of immunology, biochemistry, chemistry, molecular biology, microbiology, cell biology, genomics and recombinant DNA, which are within the skill of the art. See Sambrook, Fritsch and Maniatis, MOLECULAR CLONING: A LABORATORY MANUAL, 2nd edition (1989); CURRENT PROTOCOLS IN MOLECULAR BIOLOGY (F. M. Ausubel, et al. eds., (1987)); the series METHODS IN ENZYMOLOGY (Academic Press, Inc.): PCR 2: A PRACTICAL APPROACH (M. J. MacPherson, B. D. Hames and G. R. Taylor eds. (1995)), Harlow and Lane, eds. (1988) ANTIBODIES, A LABORATORY MANUAL, and ANIMAL CELL CULTURE (R. I. Freshney, ed. (1987)).

[0142] The present invention comprehends spatiotemporal control of endogenous or exogenous gene expression using a form of energy. The form of energy may include but is not limited to electromagnetic radiation, sound energy, chemical energy and thermal energy. In a preferred embodiment of the invention, the form of energy is electromagnetic radiation, preferably, light energy. Previous approaches to control expression of endogenous genes, such as transcription activators linked to DNA binding zinc finger proteins provided no mechanism for temporal or spatial control. The capacity for photoactivation of the system described herein allows the induction of gene expression modulation to begin at a precise time within a localized population of cells.

[0143] Aspects of control as detailed in this application relate to at least one or more switch(es). The term “switch” as used herein refers to a system or a set of components that act in a coordinated manner to affect a change, encompassing all aspects of biological function such as activation, repression, enhancement or termination of that function. In one aspect the term switch encompasses genetic switches which comprise the basic components of gene regulatory proteins and the specific DNA sequences that these proteins recognize. In one aspect, switches relate to inducible and repressible systems used in gene regulation. In general, an inducible system may be off unless there is the presence of some molecule (called an inducer) that allows for gene expression. The molecule is said to “induce expression”. The manner by which this happens is dependent on the control mechanisms as well as differences in cell type. A repressible system is on except in the presence of some molecule (called a corepressor) that suppresses gene expression. The molecule is said to “repress expression”. The manner by which this happens is dependent on the control mechanisms as well as differences in cell type. The term “inducible” as used herein may encompass all aspects of a switch irrespective of the molecular mechanism involved. Accordingly a switch as comprehended by the invention may include but is not limited to antibiotic based inducible systems, electromagnetic energy based inducible systems, small molecule based inducible systems, nuclear receptor based inducible systems and hormone based inducible systems. In preferred embodiments the switch may be a tetracycline (Tet)/DOX inducible system, a light inducible systems, a Abscisic acid (ABA) inducible system, a cumate repressor/operator system, a 4OHT/estrogen inducible system, an ecdysone-based inducible systems or a FKBP12/FRAP (FKBP12-rapamycin complex) inducible system.

[0144] In one aspect of the invention at least one switch may be associated with a TALE or CRISPR-Cas system wherein the activity of the TALE or CRISPR-Cas system is controlled by contact with at least one inducer energy source as to the switch. The term “contact” as used herein for aspects of the invention refers to any associative relationship between the switch and the inducer energy source, which may be a physical interaction with a component (as in molecules or proteins which bind together) or being in the path or being struck by energy emitted by the energy source (as in the case of absorption or reflection of light, heat or sound). In some aspects of the invention the contact of the switch with the inducer energy source is brought about by application of the inducer energy source. The invention also comprehends contact via passive feedback systems. This includes but is not limited to any passive regulation mechanism by which the TALE or CRISPR-Cas system activity is controlled by contact with an inducer energy source that is already present and hence does not need to be applied. For example this energy source may be a molecule or protein already existent in the cell or in the cellular environment. Interactions which bring about contact passively may include but are not limited to receptor/ligand binding, receptor/chemical ligand binding, receptor/protein binding, antibody/protein binding, protein dimerization, protein heterodimerization, protein multimerization, nuclear receptor/ligand binding, post-translational modifications such as phosphorylation, dephosphorylation, ubiquitination or deubiquitination.

[0145] Two key molecular tools were leveraged in the design of the photoresponsive transcription activator-like (TAL) effector system. First, the DNA binding specificity of engineered TAL effectors is utilized to localize the complex to a particular region in the genome. Second, light-induced protein dimerization is used to attract an activating or repressing domain to the region specified by the TAL effector, resulting in modulation of the downstream gene.

[0146] Inducible effectors are contemplated for in vitro or in vivo application in which temporally or spatially specific gene expression control is desired. In vitro examples: temporally precise induction/suppression of developmental genes to elucidate the timing of developmental cues, spatially controlled induction of cell fate reprogramming factors for the generation of cell-type patterned tissues. In vivo examples: combined temporal and spatial control of gene expression within specific brain regions.

[0147] In a preferred embodiment of the invention, the inducible effector is a Light Inducible Transcriptional Effector (LITE). The modularity of the LITE system allows for any number of effector domains to be employed for transcriptional modulation. In a particularly advantageous embodiment, transcription activator like effector (TALE) and the activation domain VP64 are utilized in the present invention.

[0148] LITEs are designed to modulate or alter expression of individual endogenous genes in a temporally and spatially precise manner. Each LITE may comprise a two component system consisting of a customized DNA-binding transcription activator like effector (TALE) protein, a light-responsive cryptochrome heterodimer from Arabadopsis thaliana, and a transcriptional activation/repression domain. The TALE is designed to bind to the promoter sequence of the gene of interest. The TALE protein is fused to one half of the cryptochrome heterodimer (cryptochrome-2 or CIB1), while the remaining cryptochrome partner is fused to a transcriptional effector domain. Effector domains may be either activators, such as VP16, VP64, or p65, or repressors, such as KRAB, EnR, or SID. In a LITE's unstimulated state, the TALE-cryptochrome2 protein localizes to the promoter of the gene of interest, but is not bound to the CIB1-effector protein. Upon stimulation of a LITE with blue spectrum light, cryptochrome-2 becomes activated, undergoes a conformational change, and reveals its binding domain. CIB1, in turn, binds to cryptochrome-2 resulting in localization of the effector domain to the promoter region of the gene of interest and initiating gene overexpression or silencing.

[0149] Activator and repressor domains may selected on the basis of species, strength, mechanism, duration, size, or any number of other parameters. Preferred effector domains include, but are not limited to, a transposase domain, integrase domain, recombinase domain, resolvase domain, invertase domain, protease domain, DNA methyltransferase domain, DNA demethylase domain, histone acetylase domain, histone deacetylases domain, nuclease domain, repressor domain, activator domain, nuclear-localization signal domains, transcription-protein recruiting domain, cellular uptake activity associated domain, nucleic acid binding domain or antibody presentation domain.

[0150] Gene targeting in a LITE or in any other inducible effector may be achieved via the specificity of customized TALE DNA binding proteins. A target sequence in the promoter region of the gene of interest is selected and a TALE customized to this sequence is designed. The central portion of the TALE consists of tandem repeats 34 amino acids in length. Although the sequences of these repeats are nearly identical, the 12th and 13th amino acids (termed repeat variable diresidues) of each repeat vary, determining the nucleotide-binding specificity of each repeat. Thus, by synthesizing a construct with the appropriate ordering of TALE monomer repeats, a DNA binding protein specific to the target promoter sequence is created.

[0151] In advantageous embodiments of the invention, the methods provided herein use isolated, non-naturally occurring, recombinant or engineered DNA binding proteins that comprise TALE monomers or TALE monomers or half monomers as a part of their organizational structure that enable the targeting of nucleic acid sequences with improved efficiency and expanded specificity.

[0152] Naturally occurring TALEs or “wild type TALEs” are nucleic acid binding proteins secreted by numerous species of proteobacteria. TALE polypeptides contain a nucleic acid binding domain composed of tandem repeats of highly conserved monomer polypeptides that are predominantly 33, 34 or 35 amino acids in length and that differ from each other mainly in amino acid positions 12 and 13. In advantageous embodiments the nucleic acid is DNA. As used herein, the term “polypeptide monomers”, “TALE monomers” or “monomers” will be used to refer to the highly conserved repetitive polypeptide sequences within the TALE nucleic acid binding domain and the term “repeat variable di-residues” or “RVD” will be used to refer to the highly variable amino acids at positions 12 and 13 of the polypeptide monomers. A general representation of a TALE monomer which is comprised within the DNA binding domain is X₁₋₁₁-(X₁₂X₁₃)-X_{14-33 or 34 or 35}, where the subscript indicates the amino acid position and X represents any amino acid. X₁₂X₁₃ indicate the RVDs. In some polypeptide monomers, the variable amino acid at position 13 is missing or absent and in such monomers, the RVD consists of a single amino acid. In such cases the RVD may be alternatively represented as X*, where X represents X₁₂ and (*) indicates that X₁₃ is absent. The DNA binding domain comprises several repeats of TALE monomers and this may be represented as (X₁₋₁₁-(X₁₂X₁₃)-X_{14-33 or 34 or 35})_{z}, where in an advantageous embodiment, z is at least 5 to 40. In a further advantageous embodiment, z is at least 10 to 26.

[0153] The TALE monomers have a nucleotide binding affinity that is determined by the identity of the amino acids in its RVD. For example, polypeptide monomers with an RVD of NI preferentially bind to adenine (A), monomers with an RVD of NG preferentially bind to thymine (T), monomers with an RVD of HD preferentially bind to cytosine (C) and monomers with an RVD of NN preferentially bind to both adenine (A) and guanine (G). In yet another embodiment of the invention, monomers with an RVD of IG preferentially bind to T. Thus, the number and order of the polypeptide monomer repeats in the nucleic acid binding domain of a TALE determines its nucleic acid target specificity. In still further embodiments of the invention, monomers with an RVD of NS recognize all four base pairs and may bind to A, T, G or C. The structure and function of TALEs is further described in, for example, Moscou et al., Science 326:1501 (2009); Boch et al., Science 326:1509-1512 (2009); and Zhang et al., Nature Biotechnology 29:149-153 (2011), each of which is incorporated by reference in its entirety.

[0154] The polypeptides used in methods of the invention are isolated, non-naturally occurring, recombinant or engineered nucleic acid-binding proteins that have nucleic acid or DNA binding regions containing polypeptide monomer repeats that are designed to target specific nucleic acid sequences.

[0155] As described herein, polypeptide monomers having an RVD of HN or NH preferentially bind to guanine and thereby allow the generation of TALE polypeptides with high binding specificity for guanine containing target nucleic acid sequences. In a preferred embodiment of the invention, polypeptide monomers having RVDs RN, NN, NK, SN, NH, KN, HN, NQ, HH, RG, KH, RH and SS preferentially bind to guanine. In a much more advantageous embodiment of the invention, polypeptide monomers having RVDs RN, NK, NQ. HH, KH, RH, SS and SN preferentially bind to guanine and thereby allow the generation of TALE polypeptides with high binding specificity for guanine containing target nucleic acid sequences. In an even more advantageous embodiment of the invention, polypeptide monomers having RVDs HH, KH, NH, NK, NQ, RH, RN and SS preferentially bind to guanine and thereby allow the generation of TALE polypeptides with high binding specificity for guanine containing target nucleic acid sequences. In a further advantageous embodiment, the RVDs that have high binding specificity for guanine are RN, NH RH and KH. Furthermore, polypeptide monomers having an RVD of NV preferentially bind to adenine and guanine. In more preferred embodiments of the invention, monomers having RVDs of H*, HA, KA, N*, NA, NC, NS, RA, and S* bind to adenine, guanine, cytosine and thymine with comparable affinity.

[0156] In even more advantageous embodiments of the invention the RVDs that have a specificity for adenine are NI, RI, KI, HI, and SI. In more preferred embodiments of the invention, the RVDs that have a specificity for adenine are HN, SI and RI, most preferably the RVD for adenine specificity is SI. In even more preferred embodiments of the invention the RVDs that have a specificity for thymine are NG. HG. RG and KG. In further advantageous embodiments of the invention, the RVDs that have a specificity for thymine are KG, HG and RG, most preferably the RVD for thymine specificity is KG or RG. In even more preferred embodiments of the invention the RVDs that have a specificity for cytosine are HD, ND, KD, RD, HH, YG and SD. In a further advantageous embodiment of the invention, the RVDs that have a specificity for cytosine are SD and RD. Refer to FIG. 7B for representative RVDs and the nucleotides they target to be incorporated into the most preferred embodiments of the invention. In a further advantageous embodiment the variant TALE monomers may comprise any of the RVDs that exhibit specificity for a nucleotide as depicted in FIG. 7A. All such TALE monomers allow for the generation of degenerative TALE polypeptides able to bind to a repertoire of related, but not identical, target nucleic acid sequences. In still further embodiments of the invention, the RVD NT may bind to G and A. In yet further embodiments of the invention, the RVD NP may bind to A, T and C. In more advantageous embodiments of the invention, at least one selected RVD may be NI, HD, NG, NN, KN, RN, NH, NQ, SS, SN, NK, KH, RH, HH, KI, HI, RI, SI, KG, HG, RG, SD, ND, KD, RD, YG, HN, NV, NS, HA, S*, N*, KA, H*, RA, NA or NC.

[0157] The predetermined N-terminal to C-terminal order of the one or more polypeptide monomers of the nucleic acid or DNA binding domain determines the corresponding predetermined target nucleic acid sequence to which the polypeptides of the invention will bind. As used herein the monomers and at least one or more half monomers are “specifically ordered to target” the genomic locus or gene of interest. In plant genomes, the natural TALE-binding sites always begin with a thymine (T), which may be specified by a cryptic signal within the non-repetitive N-terminus of the TALE polypeptide; in some cases this region may be referred to as repeat 0. In animal genomes, TALE binding sites do not necessarily have to begin with a thymine (T) and polypeptides of the invention may target DNA sequences that begin with T, A, G or C. The tandem repeat of TALE monomers always ends with a half-length repeat or a stretch of sequence that may share identity with only the first 20 amino acids of a repetitive full length TALE monomer and this half repeat may be referred to as a half-monomer (FIG. 8). Therefore, it follows that the length of the nucleic acid or DNA being targeted is equal to the number of full monomers plus two.

[0158] For example, nucleic acid binding domains may be engineered to contain 5, 6, 7, 8, 9, 10, 11, 12, 13, 14, 15, 16, 17, 18, 19, 20, 21, 22, 23, 24, 25, or more polypeptide monomers arranged in a N-terminal to C-terminal direction to bind to a predetermined 5, 6, 7, 8, 9, 10, 11, 12, 13, 14, 15, 16, 17, 18, 19, 20, 21, 22, 23, 24, 25 nucleotide length nucleic acid sequence. In more advantageous embodiments of the invention, nucleic acid binding domains may be engineered to contain 5, 6, 7, 8, 9, 10, 11, 12, 13, 14, 15, 16, 17, 18, 19, 20, 21, 22, 23, 24, 25, 26 or more full length polypeptide monomers that are specifically ordered or arranged to target nucleic acid sequences of length 7, 8, 9, 10, 11, 12, 13, 14, 15, 16, 17, 18, 19, 20, 21, 22, 23, 24, 25, 26, 27 and 28 nucleotides, respectively. In certain embodiments the polypeptide monomers are contiguous. In some embodiments, half-monomers may be used in the place of one or more monomers, particularly if they are present at the C-terminus of the TALE polypeptide.

[0159] Polypeptide monomers are generally 33, 34 or 35 amino acids in length. With the exception of the RVD, the amino acid sequences of polypeptide monomers are highly conserved or as described herein, the amino acids in a polypeptide monomer, with the exception of the RVD, exhibit patterns that effect TALE activity, the identification of which may be used in preferred embodiments of the invention. Representative combinations of amino acids in the monomer sequence, excluding the RVD, are shown by the Applicants to have an effect on TALE activity (FIG. 10). In more preferred embodiments of the invention, when the DNA binding domain comprises (X₁₋₁₁-X₁₂X₁₃-X_{14-33 or 34 or 35})_{z}, wherein X₁₋₁₁ is a chain of 11 contiguous amino acids, wherein X₁₂X₁₃ is a repeat variable diresidue (RVD), wherein X_{14-33 or 34 or 35} is a chain of 21, 22 or 23 contiguous amino acids, wherein z is at least 5 to 26, then the preferred combinations of amino acids are [LTLD](SEQ ID NO: 1) or [LTLA](SEQ ID NO: 2) or [LTQV](SEQ ID NO: 3) at X₁₄, or [EQHG](SEQ ID NO: 4) or [RDHG](SEQ ID NO: 5) at positions X₃₀₋₃₃ or X₃₁₋₃₄ or X₃₂-?₅. Furthermore, other amino acid combinations of interest in the monomers are [LTPD](SEQ ID NO: 7) at X₁₋₄ and [NQALE](SEQ ID NO: 8) at X₁₆₋₂₀ and [DHG] at X₃₂₋₃₄ when the monomer is 34 amino acids in length. When the monomer is 33 or 35 amino acids long, then the corresponding shift occurs in the positions of the contiguous amino acids [NQALE](SEQ ID NO: 8) and [DHG]; preferably, embodiments of the invention may have [NQALE](SEQ ID NO: 8) at X₁₅₋₁₉ or X₁₇₋₂₁ and [DHG] at X₃₁₋₃₃ or X₃₃₋₃₅.

[0160] In still further embodiments of the invention, amino acid combinations of interest in the monomers, are [LTPD](SEQ ID NO: 7) at X₁₋₄ and [KRALE](SEQ ID NO: 9) at X₁₆₋₂₀ and [AHG] at X₃₂₋₃₄ or [LTPE](SEQ ID NO: 10) at X₁₋₄ and [KRALE](SEQ ID NO: 9) at X₁₆₋₂₀ and [DHG] at X₃₂₋₃₄ when the monomer is 34 amino acids in length. When the monomer is 33 or 35 amino acids long, then the corresponding shift occurs in the positions of the contiguous amino acids [KRALE](SEQ ID NO: 9), [AHG] and [DHG]. In preferred embodiments, the positions of the contiguous amino acids may be ([LTPD](SEQ ID NO: 7) at X₁₋₄ and [KRALE](SEQ ID NO: 9) at X₁₅₋₁₉ and [AHG] at X₃₁₋₃₃) or ([LTPE](SEQ ID NO: 10) at X₁₋₄ and [KRALE](SEQ ID NO: 9) at X₁₅₋₁₉ and [DHG] at X₃₁₋₃₃) or ([LTPD](SEQ ID NO: 7) at X₁₋₄ and [KRALE](SEQ ID NO: 9) at X₁₇₋₂₁ and [AHG] at X₃₃₋₃₅) or ([LTPE](SEQ ID NO: 10) at X₁₋₄ and [KRALE](SEQ ID NO: 9) at X₁₇₋₂₁ and [DHG] at X₃₃₋₃₅). In still further embodiments of the invention, contiguous amino acids [NGKQALE](SEQ ID NO: 11) are present at positions X₁₄₋₂₀ or X₁₋₁₉ or X₁₅₋₂₁. These representative positions put forward various embodiments of the invention and provide guidance to identify additional amino acids of interest or combinations of amino acids of interest in all the TALE monomers described herein (FIGS. 9A-F and 10).

[0161] Provided below are exemplary amino acid sequences of conserved portions of polypeptide monomers (SEQ ID NOS 12-24, respectively, in order of appearance). The position of the RVD in each sequence is represented by XX or by X* (wherein (*) indicates that the RVD is a single amino acid and residue 13 (X₁₃) is absent).

L T P A Q V V A I A S X X G G K Q A L E T V Q R L L P V L C Q D H G
L T P A Q V V A I A S X * G G K Q A L E T V Q R L L P V L C Q D H G
L T P D Q V V A I A N X X G G K Q A L A T V Q R L L P V L C Q D H G
L T P D Q V V A I A N X X G G K Q A L E T L Q R L L P V L C Q D H G
L T P D Q V V A I A N X X G G K Q A L E T V Q R L L P V L C Q D H G
L T P D Q V V A I A S X X G G K Q A L A T V Q R L L P V L C Q D H G
L T P D Q V V A I A S X X G G K Q A L E T V Q R L L P V L C Q D H G
L T P D Q V V A I A S X X G G K Q A L E T V Q R V L P V L C Q D H G
L T P E Q V V A I A S X X G G K Q A L E T V Q R L L P V L C Q A H G
L T P Y Q V V A I A S X X G S K Q A L E T V Q R L L P V L C Q D H G
L T R E Q V V A I A S X X G G K Q A L E T V Q R L L P V L C Q D H G
L S T A Q V V A I A S X X G G K Q A L E G I G E Q L L K L R T A P Y G
L S T A Q V V A V A S X X G G K P A L E A V R A Q L L A L R A A P Y G

[0162] A further listing of TALE monomers excluding the RVDs which may be denoted in a sequence (X₁₋₁₁X₁₄₋₃₄ or X₁₋₁₁-X₁₄₋₃₅), wherein X is any amino acid and the subscript is the amino acid position is provided in FIG. 9A-F. The frequency with which each monomer occurs is also indicated.

[0163] As described in Zhang et al., Nature Biotechnology 29:149-153 (2011). TALE polypeptide binding efficiency may be increased by including amino acid sequences from the “capping regions” that are directly N-terminal or C-terminal of the DNA binding region of naturally occurring TALEs into the engineered TALEs at positions N-terminal or C-terminal of the engineered TALE DNA binding region. Thus, in certain embodiments, the TALE polypeptides described herein further comprise an N-terminal capping region and/or a C-terminal capping region.

[0164] An exemplary amino acid sequence of a N-terminal capping region is:

(SEQ ID NO: 25)
M D P I R S R T P S P A R E L L S G P Q P D G V Q
P T A D R G V S P P A G G P L D G L P A R R T M S
R T R L P S P P A P S P A F S A D S F S D L L R Q
F D P S L F N T S L F D S L P P F G A H H T E A A
T G E W D E V Q S G L R A A D A P P P T M R V A V
T A A R P P R A K P A P R R R A A Q P S D A S P A
A Q V D L R T L G Y S Q Q Q Q E K I K P K V R S T
V A Q H H E A L V G H G F T H A H I V A L S Q H P
A A L G T V A V K Y Q D M I A A L P E A T H E A I
V G V G K Q W S G A R A L E A L L T V A G E L R G
P P L Q L D T G Q L L K I A K R G G V T A V E A V
H A W R N A L T G A P L N

[0165] An exemplary amino acid sequence of a C-terminal capping region is:

(SEQ ID NO: 26)
R P A L E S I V A Q L S R P D P A L A A L T N D H
L V A L A C L G G R P A L D A V K K G L P H A P A
I K R T N R R I P E R T S H R V A D H A Q V V R V
L G F F Q C H S H P A Q A F D D A M T Q F G M S R
H G L L Q L F R R V G V T E L E A R S G T L P P A
S Q R W D R I L Q A S G M K R A K P S P T S T Q T
P D Q A S L H A F A D S L E R D L D A P S P M H E
G D Q T R A S

[0166] As used herein the predetermined “N-terminus” to “C terminus” orientation of the N-terminal capping region, the DNA binding domain comprising the repeat TALE monomers and the C-terminal capping region provide structural basis for the organization of different domains in the d-TALEs or polypeptides of the invention.

[0167] The entire N-terminal and/or C-terminal capping regions are not necessary to enhance the binding activity of the DNA binding region. Therefore, in certain embodiments, fragments of the N-terminal and/or C-terminal capping regions are included in the TALE polypeptides described herein.

[0168] In certain embodiments, the TALE polypeptides described herein contain a N-terminal capping region fragment that included at least 10, 20, 30, 40, 50, 54, 60, 70, 80, 87, 90, 94, 100, 102, 110, 117, 120, 130, 140, 147, 150, 160, 170, 180, 190, 200, 210, 220, 230, 240, 250, 260 or 270 amino acids of an N-terminal capping region. In certain embodiments, the N-terminal capping region fragment amino acids are of the C-terminus (the DNA-binding region proximal end) of an N-terminal capping region. As described in Zhang et al., Nature Biotechnology 29:149-153 (2011), N-terminal capping region fragments that include the C-terminal 240 amino acids enhance binding activity equal to the full length capping region, while fragments that include the C-terminal 147 amino acids retain greater than 80% of the efficacy of the full length capping region, and fragments that include the C-terminal 117 amino acids retain greater than 50% of the activity of the full-length capping region.

[0169] In some embodiments, the TALE polypeptides described herein contain a C-terminal capping region fragment that included at least 6, 10, 20, 30, 37, 40, 50, 60, 68, 70, 80, 90, 100, 110, 120, 127, 130, 140, 150, 155, 160, 170, 180 amino acids of a C-terminal capping region. In certain embodiments, the C-terminal capping region fragment amino acids are of the N-terminus (the DNA-binding region proximal end) of a C-terminal capping region. As described in Zhang et al., Nature Biotechnology 29:149-153 (2011), C-terminal capping region fragments that include the C-terminal 68 amino acids enhance binding activity equal to the full length capping region, while fragments that include the C-terminal 20 amino acids retain greater than 50% of the efficacy of the full length capping region.

[0170] In certain embodiments, the capping regions of the TALE polypeptides described herein do not need to have identical sequences to the capping region sequences provided herein. Thus, in some embodiments, the capping region of the TALE polypeptides described herein have sequences that are at least 50%, 60%, 70%, 80%, 85%, 90%, 91%, 92%, 93%, 94%, 95%, 96%, 97%, 98% or 99% identical or share identity to the capping region amino acid sequences provided herein. Sequence identity is related to sequence homology. Homology comparisons may be conducted by eye, or more usually, with the aid of readily available sequence comparison programs. These commercially available computer programs may calculate percent (%) homology between two or more sequences and may also calculate the sequence identity shared by two or more amino acid or nucleic acid sequences. In some preferred embodiments, the capping region of the TALE polypeptides described herein have sequences that are at least 95% dentical or share identity to the capping region amino acid sequences provided herein.

[0171] Sequence homologies may be generated by any of a number of computer programs known in the art, which include but are not limited to BLAST or FASTA. Suitable computer program for carrying out alignments like the GCG Wisconsin Bestfit package may also be used. Once the software has produced an optimal alignment, it is possible to calculate % homology, preferably % sequence identity. The software typically does this as part of the sequence comparison and generates a numerical result.

[0172] In advantageous embodiments described herein, the TALE polypeptides of the invention include a nucleic acid binding domain linked to the one or more effector domains. The terms “effector domain” or “regulatory and functional domain” refer to a polypeptide sequence that has an activity other than binding to the nucleic acid sequence recognized by the nucleic acid binding domain. By combining a nucleic acid binding domain with one or more effector domains, the polypeptides of the invention may be used to target the one or more functions or activities mediated by the effector domain to a particular target DNA sequence to which the nucleic acid binding domain specifically binds. The terms “effector domain” and “functional domain” are used interchangeably throughout this application.

[0173] In some embodiments of the TALE polypeptides described herein, the activity mediated by the effector domain is a biological activity. For example, in some embodiments the effector domain is a transcriptional inhibitor (i.e., a repressor domain), such as an mSin interaction domain (SID). SID4X domain or a Krüppel-associated box (KRAB) or fragments of the KRAB domain. In some embodiments the effector domain is an enhancer of transcription (i.e. an activation domain), such as the VP16, VP64 or p65 activation domain. A graphical comparison of the effect these different activation domains have on Sox2 mRNA level is provided in FIG. 11.

[0174] As used herein, VP16 is a herpesvirus protein. It is a very strong transcriptional activator that specifically activates viral immediate early gene expression. The VP16 activation domain is rich in acidic residues and has been regarded as a classic acidic activation domain (AAD). As used herein, VP64 activation domain is a tetrameric repeat of VP16's minimal activation domain. As used herein, p65 is one of two proteins that the NF-kappa B transcription factor complex is composed of. The other protein is p50. The p65 activation domain is a part of the p65 subunit is a potent transcriptional activator even in the absence of p50. In certain embodiments, the effector domain is a mammalian protein or biologically active fragment thereof. Such effector domains are referred to as “mammalian effector domains.”

[0175] In some embodiments, the nucleic acid binding is linked, for example, with an effector domain or functional domain that includes but is not limited to transposase domain, integrase domain, recombinase domain, resolvase domain, invertase domain, protease domain, DNA methyltransferase domain, DNA hydroxylmethylase domain, DNA demethylase domain, histone acetylase domain, histone deacetylases domain, nuclease domain, repressor domain, activator domain, nuclear-localization signal domains, transcription-regulatory protein (or transcription complex recruiting) domain, cellular uptake activity associated domain, nucleic acid binding domain, antibody presentation domain, histone modifying enzymes, recruiter of histone modifying enzymes; inhibitor of histone modifying enzymes, histone methyltransferase, histone demethylase, histone kinase, histone phosphatase, histone ribosylase, histone deribosylase, histone ubiquitinase, histone deubiquitinase, histone biotinase and histone tail protease.

[0176] In some embodiments, the effector domain is a protein domain which exhibits activities which include but are not limited to transposase activity, integrase activity, recombinase activity, resolvase activity, invertase activity, protease activity, DNA methyltransferase activity, DNA demethylase activity, histone acetylase activity, histone deacetylase activity, nuclease activity, nuclear-localization signaling activity, transcriptional repressor activity, transcriptional activator activity, transcription factor recruiting activity, or cellular uptake signaling activity. Other preferred embodiments of the invention may include any combination the activities described herein.

[0177] As described in Zhang et al., Nature Biotechnology 29:149-153 (2011), a TALE polypeptide having a nucleic acid binding domain and an effector domain may be used to target the effector domain's activity to a genomic position having a predetermined nucleic acid sequence recognized by the nucleic acid binding domain. In some embodiments of the invention described herein, TALE polypeptides are designed and used for targeting gene regulatory activity, such as transcriptional or translational modifier activity, to a regulatory, coding, and/or intergenic region, such as enhancer and/or repressor activity, that may affect transcription upstream and downstream of coding regions, and may be used to enhance or repress gene expression. For example, TALEs polypeptide may comprise effector domains having DNA-binding domains from transcription factors, effector domains from transcription factors (activators, repressors, co-activators, co-repressors), silencers, nuclear hormone receptors, and/or chromatin associated proteins and their modifiers (e.g., methylases, kinases, phosphatases, acetylases and deacetylases). In a preferred embodiment, the TALE polypeptide may comprise a nuclease domain. In a more preferred embodiment the nuclease domain is a non-specific FokI endonucleases catalytic domain.

[0178] In a further embodiment, useful domains for regulating gene expression may also be obtained from the gene products of oncogenes. In yet further advantageous embodiments of the invention, effector domains having integrase or transposase activity may be used to promote integration of exogenous nucleic acid sequence into specific nucleic acid sequence regions, eliminate (knock-out) specific endogenous nucleic acid sequence, and/or modify epigenetic signals and consequent gene regulation, such as by promoting DNA methyltransferase, DNA demethylase, histone acetylase and histone deacetylase activity. In other embodiments, effector domains having nuclease activity may be used to alter genome structure by nicking or digesting target sequences to which the polypeptides of the invention specifically bind, and may allow introduction of exogenous genes at those sites. In still further embodiments, effector domains having invertase activity may be used to alter genome structure by swapping the orientation of a DNA fragment.

[0179] In particularly advantageous embodiments, the polypeptides used in the methods of the invention may be used to target transcriptional activity. As used herein, the term “transcription factor” refers to a protein or polypeptide that binds specific DNA sequences associated with a genomic locus or gene of interest to control transcription. Transcription factors may promote (as an activator) or block (as a repressor) the recruitment of RNA polymerase to a gene of interest. Transcription factors may perform their function alone or as a part of a larger protein complex. Mechanisms of gene regulation used by transcription factors include but are not limited to a) stabilization or destabilization of RNA polymerase binding, b) acetylation or deacetylation of histone proteins and c) recruitment of co-activator or co-repressor proteins. Furthermore, transcription factors play roles in biological activities that include but are not limited to basal transcription, enhancement of transcription, development, response to intercellular signaling, response to environmental cues, cell-cycle control and pathogenesis. With regards to information on transcriptional factors, mention is made of Latchman and DS (1997) Int. J. Biochem. Cell Biol. 29 (12): 1305-12; Lee T I, Young R A (2000) Annu. Rev. Genet. 34: 77-137 and Mitchell P J, Tjian R (1989) Science 245 (4916): 371-8, herein incorporated by reference in their entirety.

[0180] Light responsiveness of a LITE is achieved via the activation and binding of cryptochrome-2 and CIB1. As mentioned above, blue light stimulation induces an activating conformational change in cryptochrome-2, resulting in recruitment of its binding partner CIB1. This binding is fast and reversible, achieving saturation in <15 sec following pulsed stimulation and returning to baseline <15 min after the end of stimulation. These rapid binding kinetics result in a LITE system temporally bound only by the speed of transcription/translation and transcript/protein degradation, rather than uptake and clearance of inducing agents. Crytochrome-2 activation is also highly sensitive, allowing for the use of low light intensity stimulation and mitigating the risks of phototoxicity. Further, in a context such as the intact mammalian brain, variable light intensity may be used to control the size of a LITE stimulated region, allowing for greater precision than vector delivery alone may offer.

[0181] The modularity of the LITE system allows for any number of effector domains to be employed for transcriptional modulation. Thus, activator and repressor domains may be selected on the basis of species, strength, mechanism, duration, size, or any number of other parameters.

[0182] Applicants next present two prototypical manifestations of the LITE system. The first example is a LITE designed to activate transcription of the mouse gene NEUROG2. The sequence TGAATGATGATAATACGA (SEQ ID NO: 27), located in the upstream promoter region of mouse NEUROG2, was selected as the target and a TALE was designed and synthesized to match this sequence. The TALE sequence was linked to the sequence for cryptochrome-2 via a nuclear localization signal (amino acids: SPKKKRKVEAS (SEQ ID NO: 28)) to facilitate transport of the protein from the cytosol to the nuclear space. A second vector was synthesized comprising the CIB1 domain linked to the transcriptional activator domain VP64 using the same nuclear localization signal. This second vector, also a GFP sequence, is separated from the CIB1-VP64 fusion sequence by a 2A translational skip signal. Expression of each construct was driven by a ubiquitous, constitutive promoter (CMV or EF1-α). Mouse neuroblastoma cells from the Neuro 2A cell line were co-transfected with the two vectors. After incubation to allow for vector expression, samples were stimulated by periodic pulsed blue light from an array of 488 nm LEDs. Unstimulated co-transfected samples and samples transfected only with the fluorescent reporter YFP were used as controls. At the end of each experiment, mRNA was purified from the samples analyzed via qPCR.

[0183] Truncated versions of cryptochrome-2 and CIB1 were cloned and tested in combination with the full-length versions of cryptochrome-2 and CIB1 in order to determine the effectiveness of each heterodimer pair. The combination of the CRY2PHR domain, consisting of the conserved photoresponsive region of the cryptochrome-2 protein, and the full-length version of CIB1 resulted in the highest upregulation of Neurog2 mRNA levels (˜22 fold over YFP samples and ˜7 fold over unstimulated co-transfected samples). The combination of full-length cryptochrome-2 (CRY2) with full-length CIB1 resulted in a lower absolute activation level (˜4.6 fold over YFP), but also a lower baseline activation (˜1.6 fold over YFP for unstimulated co-transfected samples). These cryptochrome protein pairings may be selected for particular uses depending on absolute level of induction required and the necessity to minimize baseline “leakiness” of the LITE system.

[0184] Speed of activation and reversibility are critical design parameters for the LITE system. To characterize the kinetics of the LITE system, constructs consisting of the Neurog2 TALE-CRY2PHR and CIB1-VP64 version of the system were tested to determine its activation and inactivation speed. Samples were stimulated for as little as 0.5 h to as long as 24 h before extraction. Upregulation of Neurog2 expression was observed at the shortest, 0.5 h, time point (˜5 fold vs YFP samples). Neurog2 expression peaked at 12 h of stimulation (˜19 fold vs YFP samples). Inactivation kinetics were analyzed by stimulating co-transfected samples for 6 h, at which time stimulation was stopped, and samples were kept in culture for 0 to 12 h to allow for mRNA degradation. Neurog2 mRNA levels peaked at 0.5 h after the end of stimulation (˜16 fold vs. YFP samples), after which the levels degraded with an ˜3 h half-life before returning to near baseline levels by 12 h.

[0185] The second prototypical example is a LITE designed to activate transcription of the human gene KLF4. The sequence TTCTTACTTATAAC (SEQ ID NO: 29), located in the upstream promoter region of human KLF4, was selected as the target and a TALE was designed and synthesized to match this sequence. The TALE sequence was linked to the sequence for CRY2PHR via a nuclear localization signal (amino acids: SPKKKRKVEAS (SEQ ID NO: 28)). The identical CIB1-VP64 activator protein described above was also used in this manifestation of the LITE system. Human embryonal kidney cells from the HEK293FT cell line were co-transfected with the two vectors. After incubation to allow for vector expression, samples were stimulated by periodic pulsed blue light from an array of 488 nm LEDs. Unstimulated co-transfected samples and samples transfected only with the fluorescent reporter YFP were used as controls. At the end of each experiment, mRNA was purified from the samples analyzed via qPCR.

[0186] The light-intensity response of the LITE system was tested by stimulating samples with increased light power (0-9 mW/cm²). Upregulation of KLF4 mRNA levels was observed for stimulation as low as 0.2 mW/cm². KLF4 upregulation became saturated at 5 mW/cm² (2.3 fold vs. YFP samples). Cell viability tests were also performed for powers up to 9 mW/cm² and showed >98% cell viability. Similarly, the KLF4 LITE response to varying duty cycles of stimulation was tested (1.6-100%). No difference in KLF4 activation was observed between different duty cycles indicating that a stimulation paradigm of as low as 0.25 sec every 15 sec should result in maximal activation.

[0187] The invention contemplates energy sources such as electromagnetic radiation, sound energy or thermal energy. Advantageously, the electromagnetic radiation is a component of visible light. In a preferred embodiment, the light is a blue light with a wavelength of about 450 to about 495 nm. In an especially preferred embodiment, the wavelength is about 488 nm. In another preferred embodiment, the light stimulation is via pulses. The light power may range from about 0-9 mW/cm². In a preferred embodiment, a stimulation paradigm of as low as 0.25 sec every 15 sec should result in maximal activation.

[0188] The invention particularly relates to inducible methods of perturbing a genomic or epigenomic locus or altering expression of a genomic locus of interest in a cell wherein the genomic or epigenomic locus may be contacted with a non-naturally occurring or engineered composition comprising a deoxyribonucleic acid (DNA) binding polypeptide.

[0189] The cells of the present invention may be a prokaryotic cell or a eukaryotic cell, advantageously an animal cell, more advantageously a mammalian cell.

[0190] This polypeptide may include a DNA binding domain comprising at least five or more Transcription activator-like effector (TALE) monomers and at least one or more half-monomers specifically ordered to target the genomic locus of interest or at least one or more effector domains linked to a chemical sensitive protein or fragment thereof. The chemical or energy sensitive protein or fragment thereof may undergo a conformational change upon induction by the binding of a chemical source allowing it to bind an interacting partner. The polypeptide may also include a DNA binding domain comprising at least one or more variant TALE monomers or half-monomers specifically ordered to target the genomic locus of interest or at least one or more effector domains linked to the interacting partner, wherein the chemical or energy sensitive protein or fragment thereof may bind to the interacting partner upon induction by the chemical source. The method may also include applying the chemical source and determining that the expression of the genomic locus is altered.

[0191] There are several different designs of this chemical inducible system: 1. ABI-PYL based system inducible by Abscisic Acid (ABA), 2. FKBP-FRB based system inducible by rapamycin (or related chemicals based on rapamycin), 3. GID1-GA1 based system inducible by Gibberellin (GA).

[0192] Another system contemplated by the present invention is a chemical inducible system based on change in sub-cellular localization. Applicants also developed a system in which the polypeptide include a DNA binding domain comprising at least five or more Transcription activator-like effector (TALE) monomers and at least one or more half-monomers specifically ordered to target the genomic locus of interest linked to at least one or more effector domains are further linker to a chemical or energy sensitive protein. This protein will lead to a change in the sub-cellular localization of the entire polypeptide (i.e. transportation of the entire polypeptide from cytoplasm into the nucleus of the cells) upon the binding of a chemical or energy transfer to the chemical or energy sensitive protein. This transportation of the entire polypeptide from one sub-cellular compartments or organelles, in which its activity is sequestered due to lack of substrate for the effector domain, into another one in which the substrate is present would allow the entire polypeptide to come in contact with its desired substrate (i.e. genomic DNA in the mammalian nucleus) and result in activation or repression of target gene expression.

[0193] This type of system could also be used to induce the cleavage of a genomic locus of interest in a cell when the effector domain is a nuclease.

[0194] The designs for this chemical inducible system is an estrogen receptor (ER) based system inducible by 4-hydroxytamoxifen (4OHT). A mutated ligand-binding domain of the estrogen receptor called ERT2 translocates into the nucleus of cells upon binding of 4-hydroxytamoxifen. Two tandem ERT2 domains were linked together with a flexible peptide linker and then fused to the TALE protein targeting a specific sequence in the mammalian genome and linked to one or more effector domains. This polypeptide will be in the cytoplasm of cells in the absence of 4OHT, which renders the TALE protein linked to the effector domains inactive. In the presence of 4OHT, the binding of 4OHT to the tandem ERT2 domain will induce the transportation of the entire peptide into nucleus of cells, allowing the TALE protein linked to the effector domains become active.

[0195] In another embodiment of the estrogen receptor (ER) based system inducible by 4-hydroxytamoxifen (4OHT), the present invention may comprise a nuclear exporting signal (NES). Advantageously, the NES may have the sequence of LDLASLIL (SEQ ID NO: 6). In further embodiments of the invention any naturally occurring or engineered derivative of any nuclear receptor, thyroid hormone receptor, retinoic acid receptor, estrogen receptor, estrogen-related receptor, glucocorticoid receptor, progesterone receptor, androgen receptor may be used in inducible systems analogous to the ER based inducible system.

[0196] Another inducible system is based on the design using Transient receptor potential (TRP) ion channel based system inducible by energy, heat or radio-wave. These TRP family proteins respond to different stimuli, including light and heat. When this protein is activated by light or heat, the ion channel will open and allow the entering of ions such as calcium into the plasma membrane. This inflex of ions will bind to intracellular ion interacting partners linked to a polypeptide include TALE protein and one or more effector domains, and the binding will induce the change of sub-cellular localization of the polypeptide, leading to the entire polypeptide entering the nucleus of cells. Once inside the nucleus, the TALE protein linked to the effector domains will be active and modulating target gene expression in cells.

[0197] This type of system could also be used to induce the cleavage of a genomic locus of interest in a cell when the effector domain is a nuclease. The light could be generated with a laser or other forms of energy sources. The heat could be generated by raise of temperature results from an energy source, or from nano-particles that release heat after absorbing energy from an energy source delivered in the form of radio-wave.

[0198] While light activation may be an advantageous embodiment, sometimes it may be disadvantageous especially for in vivo applications in which the light may not penetrate the skin or other organs. In this instance, other methods of energy activation are contemplated, in particular, electric field energy and/or ultrasound which have a similar effect. If necessary, the proteins pairings of the LITE system may be altered and/or modified for maximal effect by another energy source.

[0199] Electric field energy is preferably administered substantially as described in the art, using one or more electric pulses of from about 1 Volt/cm to about 10 kVolts/cm under in vive conditions. Instead of or in addition to the pulses, the electric field may be delivered in a continuous manner. The electric pulse may be applied for between 1 μs and 500 milliseconds, preferably between 1 μs and 100 milliseconds. The electric field may be applied continuously or in a pulsed manner for 5 about minutes.

[0200] As used herein, ‘electric field energy’ is the electrical energy to which a cell is exposed. Preferably the electric field has a strength of from about 1 Volt/cm to about 10 kVolts/cm or more under in vivo conditions (see WO97/49450).

[0201] As used herein, the term “electric field” includes one or more pulses at variable capacitance and voltage and including exponential and/or square wave and/or modulated wave and/or modulated square wave forms. References to electric fields and electricity should be taken to include reference the presence of an electric potential difference in the environment of a cell. Such an environment may be set up by way of static electricity, alternating current (AC), direct current (DC), etc, as known in the art. The electric field may be uniform, non-uniform or otherwise, and may vary in strength and/or direction in a time dependent manner.

[0202] Single or multiple applications of electric field, as well as single or multiple applications of ultrasound are also possible, in any order and in any combination. The ultrasound and/or the electric field may be delivered as single or multiple continuous applications, or as pulses (pulsatile delivery).

[0203] Electroporation has been used in both in vitro and in vivo procedures to introduce foreign material into living cells. With in vitro applications, a sample of live cells is first mixed with the agent of interest and placed between electrodes such as parallel plates. Then, the electrodes apply an electrical field to the cell/implant mixture. Examples of systems that perform in vitro electroporation include the Electro Cell Manipulator ECM600 product, and the Electro Square Porator T820, both made by the BTX Division of Genetronics, Inc (see U.S. Pat. No. 5,869,326).

[0204] The known electroporation techniques (both in vitro and in vivo) function by applying a brief high voltage pulse to electrodes positioned around the treatment region. The electric field generated between the electrodes causes the cell membranes to temporarily become porous, whereupon molecules of the agent of interest enter the cells. In known electroporation applications, this electric field comprises a single square wave pulse on the order of 1000 V/cm, of about 100.mu.s duration. Such a pulse may be generated, for example, in known applications of the Electro Square Porator T820.

[0205] Preferably, the electric field has a strength of from about 1 V/cm to about 10 kV/cm under in vitro conditions. Thus, the electric field may have a strength of 1 V/cm, 2 V/cm, 3 V/cm, 4 V/cm, 5 V/cm, 6 V/cm, 7 V/cm, 8 V/cm, 9 V/cm, 10 V/cm, 20 V/cm, 50 V/cm, 100 V/cm, 200 V/cm, 300 V/cm, 400 V/cm, 500 V/cm, 600 V/cm, 700 V/cm, 800 V/cm, 900 V/cm, 1 kV/cm, 2 kV/cm, 5 kV/cm, 10 kV/cm, 20 kV/cm, 50 kV/cm or more. More preferably from about 0.5 kV/cm to about 4.0 kV/cm under in vitro conditions. Preferably the electric field has a strength of from about 1 V/cm to about 10 kV/cm under in vivo conditions. However, the electric field strengths may be lowered where the number of pulses delivered to the target site are increased. Thus, pulsatile delivery of electric fields at lower field strengths is envisaged.

[0206] Preferably the application of the electric field is in the form of multiple pulses such as double pulses of the same strength and capacitance or sequential pulses of varying strength and/or capacitance. As used herein, the term “pulse” includes one or more electric pulses at variable capacitance and voltage and including exponential and/or square wave and/or modulated wave/square wave forms.

[0207] Preferably the electric pulse is delivered as a waveform selected from an exponential wave form, a square wave form, a modulated wave form and a modulated square wave form.

[0208] A preferred embodiment employs direct current at low voltage. Thus, Applicants disclose the use of an electric field which is applied to the cell, tissue or tissue mass at a field strength of between IV/cm and 20V/cm, for a period of 100 milliseconds or more, preferably 15 minutes or more.

[0209] Ultrasound is advantageously administered at a power level of from about 0.05 W/cm² to about 100 W/cm². Diagnostic or therapeutic ultrasound may be used, or combinations thereof.

[0210] As used herein, the term “ultrasound” refers to a form of energy which consists of mechanical vibrations the frequencies of which are so high they are above the range of human hearing. Lower frequency limit of the ultrasonic spectrum may generally be taken as about 20 kHz. Most diagnostic applications of ultrasound employ frequencies in the range 1 and 15 MHz′ (From Ultrasonics in Clinical Diagnosis, P. N. T. Wells, ed., 2nd. Edition, Publ. Churchill Livingstone [Edinburgh. London & NY, 1977]).

[0211] Ultrasound has been used in both diagnostic and therapeutic applications. When used as a diagnostic tool (“diagnostic ultrasound”), ultrasound is typically used in an energy density range of up to about 100 mW/cm² (FDA recommendation), although energy densities of up to 750 mW/cm² have been used. In physiotherapy, ultrasound is typically used as an energy source in a range up to about 3 to 4 W/cm² (WHO recommendation). In other therapeutic applications, higher intensities of ultrasound may be employed, for example, HIFU at 100 W/cm up to 1 kW/cm² (or even higher) for short periods of time. The term “ultrasound” as used in this specification is intended to encompass diagnostic, therapeutic and focused ultrasound.

[0212] Focused ultrasound (FUS) allows thermal energy to be delivered without an invasive probe (see Morocz et al 1998 Journal of Magnetic Resonance Imaging Vol. 8, No. 1, pp. 136-142. Another form of focused ultrasound is high intensity focused ultrasound (HIFU) which is reviewed by Moussatov et al in Ultrasonics (1998) Vol. 36, No. 8, pp. 893-900 and TranHuuHue et al in Acustica (1997) Vol. 83, No. 6, pp. 1103-1106.

[0213] Preferably, a combination of diagnostic ultrasound and a therapeutic ultrasound is employed. This combination is not intended to be limiting, however, and the skilled reader will appreciate that any variety of combinations of ultrasound may be used. Additionally, the energy density, frequency of ultrasound, and period of exposure may be varied.

[0214] Preferably the exposure to an ultrasound energy source is at a power density of from about 0.05 to about 100 Wcm⁻². Even more preferably, the exposure to an ultrasound energy source is at a power density of from about 1 to about 15 Wcm⁻².

[0215] Preferably the exposure to an ultrasound energy source is at a frequency of from about 0.015 to about 10.0 MHz. More preferably the exposure to an ultrasound energy source is at a frequency of from about 0.02 to about 5.0 MHz or about 6.0 MHz. Most preferably, the ultrasound is applied at a frequency of 3 MHz.

[0216] Preferably the exposure is for periods of from about 10 milliseconds to about 60 minutes. Preferably the exposure is for periods of from about 1 second to about 5 minutes. More preferably, the ultrasound is applied for about 2 minutes. Depending on the particular target cell to be disrupted, however, the exposure may be for a longer duration, for example, for 15 minutes.

[0217] Advantageously, the target tissue is exposed to an ultrasound energy source at an acoustic power density of from about 0.05 Wcm⁻² to about 10 Wcm⁻² with a frequency ranging from about 0.015 to about 10 MHz (see WO 98/52609). However, alternatives are also possible, for example, exposure to an ultrasound energy source at an acoustic power density of above 100 Wcm⁻², but for reduced periods of time, for example, 1000 Wcm⁻² for periods in the millisecond range or less.

[0218] Preferably the application of the ultrasound is in the form of multiple pulses; thus, both continuous wave and pulsed wave (pulsatile delivery of ultrasound) may be employed in any combination. For example, continuous wave ultrasound may be applied, followed by pulsed wave ultrasound, or vice versa. This may be repeated any number of times, in any order and combination. The pulsed wave ultrasound may be applied against a background of continuous wave ultrasound, and any number of pulses may be used in any number of groups.

[0219] Preferably, the ultrasound may comprise pulsed wave ultrasound. In a highly preferred embodiment, the ultrasound is applied at a power density of 0.7 Wcm⁻² or 1.25 Wcm⁻² as a continuous wave. Higher power densities may be employed if pulsed wave ultrasound is used.

[0220] Use of ultrasound is advantageous as, like light, it may be focused accurately on a target. Moreover, ultrasound is advantageous as it may be focused more deeply into tissues unlike light. It is therefore better suited to whole-tissue penetration (such as but not limited to a lobe of the liver) or whole organ (such as but not limited to the entire liver or an entire muscle, such as the heart) therapy. Another important advantage is that ultrasound is a non-invasive stimulus which is used in a wide variety of diagnostic and therapeutic applications. By way of example, ultrasound is well known in medical imaging techniques and, additionally, in orthopedic therapy. Furthermore, instruments suitable for the application of ultrasound to a subject vertebrate are widely available and their use is well known in the art.

[0221] The rapid transcriptional response and endogenous targeting of LITEs make for an ideal system for the study of transcriptional dynamics. For example, LITEs may be used to study the dynamics of mRNA splice variant production upon induced expression of a target gene. On the other end of the transcription cycle, mRNA degradation studies are often performed in response to a strong extracellular stimulus, causing expression level changes in a plethora of genes. LITEs may be utilized to reversibly induce transcription of an endogenous target, after which point stimulation may be stopped and the degradation kinetics of the unique target may be tracked.

[0222] The temporal precision of LITEs may provide the power to time genetic regulation in concert with experimental interventions. For example, targets with suspected involvement in long-term potentiation (LTP) may be modulated in organotypic or dissociated neuronal cultures, but only during stimulus to induce LTP, so as to avoid interfering with the normal development of the cells. Similarly, in cellular models exhibiting disease phenotypes, targets suspected to be involved in the effectiveness of a particular therapy may be modulated only during treatment. Conversely, genetic targets may be modulated only during a pathological stimulus. Any number of experiments in which timing of genetic cues to external experimental stimuli is of relevance may potentially benefit from the utility of LITE modulation.

[0223] The in vivo context offers equally rich opportunities for the use of LITEs to control gene expression. As mentioned above, photoinducibility provides the potential for previously unachievable spatial precision. Taking advantage of the development of optrode technology, a stimulating fiber optic lead may be placed in a precise brain region. Stimulation region size may then be tuned by light intensity. This may be done in conjunction with the delivery of LITEs via viral vectors or the molecular sleds of U.S. Provisional Patent application No. 61/671,615, or, if transgenic LITE animals were to be made available, may eliminate the use of viruses while still allowing for the modulation of gene expression in precise brain regions. LITEs may be used in a transparent organism, such as an immobilized zebrafish, to allow for extremely precise laser induced local gene expression changes.

[0224] The present invention also contemplates a multiplex genome engineering using CRISPR/Cas systems. Functional elucidation of causal genetic variants and elements requires precise genome editing technologies. The type II prokaryotic CRISPR (clustered regularly interspaced short palindromic repeats) adaptive immune system has been shown to facilitate RNA-guided site-specific DNA cleavage. Applicants engineered two different type II CRISPR systems and demonstrate that Cas9 nucleases can be directed by short RNAs to induce precise cleavage at endogenous genomic loci in human and mouse cells. Cas9 can also be converted into a nicking enzyme to facilitate homology-directed repair with minimal mutagenic activity. Finally, multiple guide sequences can be encoded into a single CRISPR array to enable simultaneous editing of several sites within the mammalian genome, demonstrating easy programmability and wide applicability of the CRISPR technology.

[0225] In general, “CRISPR system” refers collectively to transcripts and other elements involved in the expression of or directing the activity of CRISPR-associated (“Cas”) genes, including sequences encoding a Cas gene, a tracr (trans-activating CRISPR) sequence (e.g. tracrRNA or an active partial tracrRNA), a tracr-mate sequence (encompassing a “direct repeat” and a tracrRNA-processed partial direct repeat in the context of an endogenous CRISPR system), a guide sequence (also referred to as a “spacer” in the context of an endogenous CRISPR system), or other sequences and transcripts from a CRISPR locus. In some embodiments, one or more elements of a CRISPR system is derived from a type I, type II, or type III CRISPR system. In some embodiments, one or more elements of a CRISPR system is derived from a particular organism comprising an endogenous CRISPR system, such as Streptococcus pyogenes. In general, a CRISPR system is characterized by elements that promote the formation of a CRISPR complex at the site of a target sequence (also referred to as a protospacer in the context of an endogenous CRISPR system). In the context of formation of a CRISPR complex, “target sequence” refers to a sequence to which a guide sequence is designed to have complementarity, where hybridization between a target sequence and a guide sequence promotes the formation of a CRISPR complex. A target sequence may comprise any polynucleotide, such as DNA or RNA polynucleotides. In some embodiments, a target sequence is located in the nucleus or cytoplasm of a cell.

[0226] Typically, in the context of an endogenous CRISPR system, formation of a CRISPR complex (comprising a guide sequence hybridized to a target sequence and complexed with one or more Cas proteins) results in cleavage of one or both strands in or near (e.g. within 1, 2, 3, 4, 5, 6, 7, 8, 9, 10, 20, 50, or more base pairs from) the target sequence. Without wishing to be bound by theory, all or a portion of the tracr sequence may also form part of a CRISPR complex, such as by hybridization to all or a portion of a tracr mate sequence that is operably linked to the guide sequence. In some embodiments, one or more vectors driving expression of one or more elements of a CRISPR system are introduced into a host cell such that expression of the elements of the CRISPR system direct formation of a CRISPR complex at one or more target sites. For example, a Cas enzyme, a guide sequence linked to a tracr-mate sequence, and a tracr sequence could each be operably linked to separate regulatory elements on separate vectors. Alternatively, two or more of the elements expressed from the same or different regulatory elements, may be combined in a single vector, with one or more additional vectors providing any components of the CRISPR system not included in the first vector. CRISPR system elements that are combined in a single vector may be arranged in any suitable orientation, such as one element located 5′ with respect to (“upstream” of) or 3′ with respect to (“downstream” of) a second element. The coding sequence of one element may be located on the same or opposite strand of the coding sequence of a second element, and oriented in the same or opposite direction. In some embodiments, a single promoter drives expression of a transcript encoding a CRISPR enzyme and one or more of the guide sequence, tracr mate sequence (optionally operably linked to the guide sequence), and a tracr sequence embedded within one or more intron sequences (e.g. each in a different intron, two or more in at least one intron, or all in a single intron). In some embodiments, the CRISPR enzyme, guide sequence, tracr mate sequence, and tracr sequence are operably linked to and expressed from the same promoter.

[0227] In some embodiments, a vector comprises one or more insertion sites, such as a restriction endonuclease recognition sequence (also referred to as a “cloning site”). In some embodiments, one or more insertion sites (e.g. about or more than about 1, 2, 3, 4, 5, 6, 7, 8, 9, 10, or more insertion sites) are located upstream and/or downstream of one or more sequence elements of one or more vectors. In some embodiments, a vector comprises an insertion site upstream of a tracr mate sequence, and optionally downstream of a regulatory element operably linked to the tracr mate sequence, such that following insertion of a guide sequence into the insertion site and upon expression the guide sequence directs sequence-specific binding of a CRISPR complex to a target sequence in a eukaryotic cell. In some embodiments, a vector comprises two or more insertion sites, each insertion site being located between two tracr mate sequences so as to allow insertion of a guide sequence at each site. In such an arrangement, the two or more guide sequences may comprise two or more copies of a single guide sequence, two or more different guide sequences, or combinations of these. When multiple different guide sequences are used, a single expression construct may be used to target CRISPR activity to multiple different, corresponding target sequences within a cell. For example, a single vector may comprise about or more than about 1, 2, 3, 4, 5, 6, 7, 8, 9, 10, 15, 20, or more guide sequences. In some embodiments, about or more than about 1, 2, 3, 4, 5, 6, 7, 8, 9, 10, or more such guide-sequence-containing vectors may be provided, and optionally delivered to a cell.

[0228] In some embodiments, a vector comprises a regulatory element operably linked to an enzyme-coding sequence encoding a CRISPR enzyme, such as a Cas protein. Non-limiting examples of Cas proteins include Cas1, Cas1B, Cas2, Cas3, Cas4, Cas5, Cas6, Cas7, Cas8, Cas9 (also known as Csn1 and Csx12), Cas10, Csy1, Csy2, Csy3, Cse1, Cse2, Csc1, Csc2, Csa5, Csn2, Csm2, Csm3, Csm4, Csm5, Csm6, Cmr1, Cmr3, Cmr4, Cmr5, Cmr6, Csb1, Csb2, Csb3, Csx17, Csx14, Csx10, Csx16, CsaX, Csx3, Csx1, Csx15, Csf1, Csf2, Csf3, Csf4, homologues thereof, or modified versions thereof. In some embodiments, the unmodified CRISPR enzyme has DNA cleavage activity, such as Cas9. In some embodiments, the CRISPR enzyme directs cleavage of one or both strands at the location of a target sequence, such as within the target sequence and/or within the complement of the target sequence. In some embodiments, the CRISPR enzyme directs cleavage of one or both strands within about 1, 2, 3, 4, 5, 6, 7, 8, 9, 10, 15, 20, 25, 50, 100, 200, 500, or more base pairs from the first or last nucleotide of a target sequence. In some embodiments, a vector encodes a CRISPR enzyme that is mutated to with respect to a corresponding wild-type enzyme such that the mutated CRISPR enzyme lacks the ability to cleave one or both strands of a target polynucleotide containing a target sequence. For example, an aspartate-to-alanine substitution (D10A) in the RuvC I catalytic domain of Cas9 from S. pyogenes converts Cas9 from a nuclease that cleaves both strands to a nickase (cleaves a single strand). Other examples of mutations that render Cas9 a nickase include, without limitation, H840A, N854A, and N863A. As a further example, two or more catalytic domains of Cas9 (RuvC I, RuvC II, and RuvC III) may be mutated to produce a mutated Cas9 substantially lacking all DNA cleavage activity. In some embodiments, a D10A mutation is combined with one or more of H840A, N854A, or N863A mutations to produce a Cas9 enzyme substantially lacking all DNA cleavage activity. In some embodiments, a CRISPR enzyme is considered to substantially lack all DNA cleavage activity when the DNA cleavage activity of the mutated enzyme is less than about 25%, 10%, 5%, 1%, 0.1%, 0.01%, or lower with respect to its non-mutated form.

[0229] In some embodiments, an enzyme coding sequence encoding a CRISPR enzyme is codon optimized for expression in particular cells, such as eukaryotic cells. The eukaryotic cells may be those of or derived from a particular organism, such as a mammal, including but not limited to human, mouse, rat, rabbit, dog, or non-human primate. In general, codon optimization refers to a process of modifying a nucleic acid sequence for enhanced expression in the host cells of interest by replacing at least one codon (e.g. about or more than about 1, 2, 3, 4, 5, 10, 15, 20, 25, 50, or more codons) of the native sequence with codons that are more frequently or most frequently used in the genes of that host cell while maintaining the native amino acid sequence. Various species exhibit particular bias for certain codons of a particular amino acid. Codon bias (differences in codon usage between organisms) often correlates with the efficiency of translation of messenger RNA (mRNA), which is in turn believed to be dependent on, among other things, the properties of the codons being translated and the availability of particular transfer RNA (tRNA) molecules. The predominance of selected tRNAs in a cell is generally a reflection of the codons used most frequently in peptide synthesis. Accordingly, genes can be tailored for optimal gene expression in a given organism based on codon optimization. Codon usage tables are readily available, for example, at the “Codon Usage Database” available at wwww.kazusa.orjp/codon/ (visited Jul. 9, 2002), and these tables can be adapted in a number of ways. See Nakamura, Y., et al. “Codon usage tabulated from the international DNA sequence databases: status for the year 2000” Nucl. Acids Res. 28:292 (2000). Computer algorithms for codon optimizing a particular sequence for expression in a particular host cell are also available, such as Gene Forge (Aptagen; Jacobus, PA), are also available. In some embodiments, one or more codons (e.g. 1, 2, 3, 4, 5, 10, 15, 20, 25, 50, or more, or all codons) in a sequence encoding a CRISPR enzyme correspond to the most frequently used codon for a particular amino acid.

[0230] In some embodiments, a vector encodes a CRISPR enzyme comprising one or more nuclear localization sequences (NLSs), such as about or more than about 1, 2, 3, 4, 5, 6, 7, 8, 9, 10, or more NLSs. In some embodiments, the CRISPR enzyme comprises about or more than about 1, 2, 3, 4, 5, 6, 7, 8, 9, 10, or more NLSs at or near the amino-terminus, about or more than about 1, 2, 3, 4, 5, 6, 7, 8, 9, 10, or more NLSs at or near the carboxy-terminus, or a combination of these (e.g. one or more NLS at the amino-terminus and one or more NLS at the carboxy terminus). When more than one NLS is present, each may be selected independently of the others, such that a single NLS may be present in more than one copy and/or in combination with one or more other NLSs present in one or more copies. In some embodiments, an NLS is considered near the N- or C-terminus when the nearest amino acid of the NLS is within about 1, 2, 3, 4, 5, 10, 15, 20, 25, 30, 40, 50, or more amino acids along the polypeptide chain from the N- or C-terminus. Non-limiting examples of NLSs include an NLS sequence derived from: the NLS of the SV40 virus large T-antigen, having the amino acid sequence PKKKRKV (SEQ ID NO: 30); the NLS from nucleoplasmin (e.g. the nucleoplasmin bipartite NLS with the sequence KRPAATKKAGQAKKKK (SEQ ID NO: 31)); the c-myc NLS having the amino acid sequence PAAKRVKLD (SEQ ID NO: 32) or RQRRNELKRSP (SEQ ID NO: 33); the hRNPA1 M9 NLS having the sequence NQSSNFGPMKGGNFGGRSSGPYGGGGQYFAKPRNQGGY (SEQ ID NO: 34); the sequence RMRIZFKNKGKDTAELRRRRVEVSVELRKAKKDEQILKRRNV (SEQ ID NO: 35) of the IBB domain from importin-alpha; the sequences VSRKRPRP (SEQ ID NO: 36) and PPKKARED (SEQ ID NO: 37) of the myoma T protein; the sequence QPKKKP (SEQ ID NO: 38) of human p53; the sequence SALIKKKKKMAP (SEQ ID NO: 39) of mouse c-abl IV; the sequences DRLRR (SEQ ID NO: 40) and PKQKKRK (SEQ ID NO: 41) of the influenza virus NSI; the sequence RKLKKKIKKL (SEQ ID NO: 42) of the Hepatitis virus delta antigen; the sequence REKKKFLKRR (SEQ ID NO: 43) of the mouse Mx1 protein; the sequence KRKGDEVDGVDEVAKKKSKK (SEQ ID NO: 44) of the human poly(ADP-ribose) polymerase; and the sequence RKCLQAGMNLEARKTKK (SEQ ID NO: 45) of the steroid hormone receptors (human) glucocorticoid.

[0231] In general, the one or more NLSs are of sufficient strength to drive accumulation of the CRISPR enzyme in a detectable amount in the nucleus of a eukaryotic cell. In general, strength of nuclear localization activity may derive from the number of NLSs in the CRISPR enzyme, the particular NLS(s) used, or a combination of these factors. Detection of accumulation in the nucleus may be performed by any suitable technique. For example, a detectable marker may be fused to the CRISPR enzyme, such that location within a cell may be visualized, such as in combination with a means for detecting the location of the nucleus (e.g. a stain specific for the nucleus such as DAPI). Cell nuclei may also be isolated from cells, the contents of which may then be analyzed by any suitable process for detecting protein, such as immunohistochemistry, Western blot, or enzyme activity assay. Accumulation in the nucleus may also be determined indirectly, such as by an assay for the effect of CRISPR complex formation (e.g. assay for DNA cleavage or mutation at the target sequence, or assay for altered gene expression activity affected by CRISPR complex formation and/or CRISPR enzyme activity), as compared to a control no exposed to the CRISPR enzyme or complex, or exposed to a CRISPR enzyme lacking the one or more NLSs.

[0232] In another embodiment of the present invention, the invention relates to an inducible CRISPR which may comprise an inducible Cas9.

[0233] The CRISPR system may be encoded within a vector system which may comprise one or more vectors which may comprise I, a first regulatory element operably linked to a CRISPR/Cas system chimeric RNA (chiRNA) polynucleotide sequence, wherein the polynucleotide sequence may comprise (a) a guide sequence capable of hybridizing to a target sequence in a eukaryotic cell, (b) a tracr mate sequence, and (c) a tracr sequence, and II, a second regulatory element operably linked to an enzyme-coding sequence encoding a CRISPR enzyme which may comprise at least one or more nuclear localization sequences, wherein (a), (b) and (c) are arranged in a 5′ to 3′orientation, wherein components I and II are located on the same or different vectors of the system, wherein when transcribed, the tracr mate sequence hybridizes to the tracr sequence and the guide sequence directs sequence-specific binding of a CRISPR complex to the target sequence, and wherein the CRISPR complex may comprise the CRISPR enzyme complexed with (1) the guide sequence that is hybridized to the target sequence, and (2) the tracr mate sequence that is hybridized to the tracr sequence, wherein the enzyme coding sequence encoding the CRISPR enzyme further encodes a heterologous functional domain.

[0234] In an advantageous embodiment, the inducible Cas9 may be prepared in a lentivirus. For example, FIG. 61 depicts Tet Cas9 vector designs and FIG. 62 depicts a vector and EGFP expression in 293FT cells. In particular, an inducible tetracycline system is contemplated for an inducible CRISPR. The vector may be designed as described in Markusic et al., Nucleic Acids Research, 2005, Vol. 33, No. 6 e63. The tetracycline-dependent transcriptional regulatory system is based on the Escherichia coli Tn10 Tetracycline resistance operator consisting of the tetracycline repressor protein (TetR) and a specific DNA-binding site, the tetracycline operator sequence (TetO). In the absence of tetracycline, TetR dimerizes and binds to the TetO. Tetracycline or doxycycline (a tetracycline derivative) can bind and induce a conformational change in the TetR leading to its disassociation from the TetO. In an advantageous embodiment, the vector may be a single Tet-On lentiviral vector with autoregulated rtTA expression for regulated expression of the CRISPR complex. Tetracycline or doxycycline may be contemplated for activating the inducible CRISPR complex.

[0235] In another embodiment, a cumate gene-switch system is contemplated for an inducible CRISPR. A similar system as described in Mullick et al., BMC Biotechnology 2006, 6:43 doi:10.1186/1472-6750-6-43. The inducible cumate system involves regulatory mechanisms of bacterial operons (cmt and cym) to regulate gene expression in mammalian cells using three different strategies. In the repressor configuration, regulation is mediated by the binding of the repressor (CymR) to the operator site (CuO), placed downstream of a strong constitutive promoter. Addition of cumate, a small molecule, relieves the repression. In the transactivator configuration, a chimaeric transactivator (cTA) protein, formed by the fusion of CymR with the activation domain of VP16, is able to activate transcription when bound to multiple copies of CuO, placed upstream of the CMV minimal promoter. Cumate addition abrogates DNA binding and therefore transactivation by cTA. The invention also contemplates a reverse cumate activator (rcTA), which activates transcription in the presence rather than the absence of cumate. CymR may be used as a repressor that reversibly blocks expression from a strong promoter, such as CMV. Certain aspects of the Cumate repressor/operator system are further described in U.S. Pat. No. 7,745,592.

[0236] There exists a pressing need for alternative and robust systems and techniques for sequence targeting with a wide array of applications. This invention addresses this need and provides related advantages. In one aspect, the invention provides a vector system comprising one or more vectors. In some embodiments, the system comprises: (a) a first regulatory element operably linked to a tracr mate sequence and one or more insertion sites for inserting a guide sequence upstream of the tracr mate sequence, wherein when expressed, the guide sequence directs sequence-specific binding of a CRISPR complex to a target sequence in a eukaryotic cell, wherein the CRISPR complex comprises a CRISPR enzyme complexed with (1) the guide sequence that is hybridized to the target sequence, and (2) the tracr mate sequence that is hybridized to the tracr sequence; and (b) a second regulatory element operably linked to an enzyme-coding sequence encoding said CRISPR enzyme comprising a nuclear localization sequence; wherein components (a) and (b) are located on the same or different vectors of the system. In some embodiments, component (a) further comprises the tracr sequence downstream of the tracr mate sequence under the control of the first regulatory element. In some embodiments, component (a) further comprises two or more guide sequences operably linked to the first regulatory element, wherein when expressed, each of the two or more guide sequences direct sequence specific binding of a CRISPR complex to a different target sequence in a eukaryotic cell. In some embodiments, the system comprises the tracr sequence under the control of a third regulatory element, such as a polymerase III promoter. In some embodiments, the tracr sequence exhibits at least 50% of sequence complementarity along the length of the tracr mate sequence when optimally aligned. In some embodiments, the CRISPR enzyme comprises one or more nuclear localization sequences of sufficient strength to drive accumulation of said CRISPR enzyme in a detectable amount in the nucleus of a eukaryotic cell. In some embodiments, the CRISPR enzyme is a type II CRISPR system enzyme. In some embodiments, the CRISPR enzyme is a Cas9 enzyme. In some embodiments, the CRISPR enzyme is codon-optimized for expression in a eukaryotic cell. In some embodiments, the CRISPR enzyme directs cleavage of one or two strands at the location of the target sequence. In some embodiments, the CRISPR enzyme lacks DNA strand cleavage activity. In some embodiments, the first regulatory element is a polymerase III promoter. In some embodiments, the second regulatory element is a polymerase II promoter. In some embodiments, the guide sequence is at least 15 nucleotides in length. In some embodiments, fewer than 50% of the nucleotides of the guide sequence participate in self-complementary base-pairing when optimally folded.

[0237] In one aspect, the invention provides a vector comprising a regulatory element operably linked to an enzyme-coding sequence encoding a CRISPR enzyme comprising one or more nuclear localization sequences. In some embodiments, said regulatory element drives transcription of the CRISPR enzyme in a eukaryotic cell such that said CRISPR enzyme accumulates in a detectable amount in the nucleus of the eukaryotic cell. In some embodiments, the regulatory element is a polymerase II promoter. In some embodiments, the CRISPR enzyme is a type II CRISPR system enzyme. In some embodiments, the CRISPR enzyme is a Cas9 enzyme. In some embodiments, the CRISPR enzyme is codon-optimized for expression in a eukaryotic cell. In some embodiments, the CRISPR enzyme directs cleavage of one or two strands at the location of the target sequence. In some embodiments, the CRISPR enzyme lacks DNA strand cleavage activity.

[0238] In one aspect, the invention provides a CRISPR enzyme comprising one or more nuclear localization sequences of sufficient strength to drive accumulation of said CRISPR enzyme in a detectable amount in the nucleus of a eukaryotic cell. In some embodiments, the CRISPR enzyme is a type II CRISPR system enzyme. In some embodiments, the CRISPR enzyme is a Cas9 enzyme. In some embodiments, the CRISPR enzyme lacks the ability to cleave one or more strands of a target sequence to which it binds.

[0239] In one aspect, the invention provides a eukaryotic host cell comprising (a) a first regulatory element operably linked to a tracr mate sequence and one or more insertion sites for inserting a guide sequence upstream of the tracr mate sequence, wherein when expressed, the guide sequence directs sequence-specific binding of a CRISPR complex to a target sequence in a eukaryotic cell, wherein the CRISPR complex comprises a CRISPR enzyme complexed with (1) the guide sequence that is hybridized to the target sequence, and (2) the tracr mate sequence that is hybridized to the tracr sequence; and/or (b) a second regulatory element operably linked to an enzyme-coding sequence encoding said CRISPR enzyme comprising a nuclear localization sequence. In some embodiments, the host cell comprises components (a) and (b). In some embodiments, component (a), component (b), or components (a) and (b) are stably integrated into a genome of the host eukaryotic cell. In some embodiments, component (a) further comprises the tracr sequence downstream of the tracr mate sequence under the control of the first regulatory element. In some embodiments, component (a) further comprises two or more guide sequences operably linked to the first regulatory element, wherein when expressed, each of the two or more guide sequences direct sequence specific binding of a CRISPR complex to a different target sequence in a eukaryotic cell. In some embodiments, the eukaryotic host cell further comprises a third regulatory element, such as a polymerase III promoter, operably linked to said tracr sequence. In some embodiments, the tracr sequence exhibits at least 50%, 60%, 70%, 80%, 90%, 95%, or 99% of sequence complementarity along the length of the tracr mate sequence when optimally aligned. In some embodiments, the CRISPR enzyme comprises one or more nuclear localization sequences of sufficient strength to drive accumulation of said CRISPR enzyme in a detectable amount in the nucleus of a eukaryotic cell. In some embodiments, the CRISPR enzyme is a type II CRISPR system enzyme. In some embodiments, the CRISPR enzyme is a Cas9 enzyme. In some embodiments, the CRISPR enzyme is codon-optimized for expression in a eukaryotic cell. In some embodiments, the CRISPR enzyme directs cleavage of one or two strands at the location of the target sequence. In some embodiments, the CRISPR enzyme lacks DNA strand cleavage activity. In some embodiments, the first regulatory element is a polymerase III promoter. In some embodiments, the second regulatory element is a polymerase II promoter. In some embodiments, the guide sequence is at least 15, 16, 17, 18, 19, 20, 25 nucleotides, or between 10-30, or between 15-25, or between 15-20 nucleotides in length. In some embodiments, fewer than 50%, 40%, 30%, 20%, 10%, or 5% of the nucleotides of the guide sequence participate in self-complementary base-pairing when optimally folded. In one aspect, the invention provides a non-human animal comprising a eukaryotic host cell according to any of the described embodiments.

[0240] In one aspect, the invention provides a kit comprising one or more of the components described herein. In some embodiments, the kit comprises a vector system and instructions for using the kit. In some embodiments, the vector system comprises (a) a first regulatory element operably linked to a tracr mate sequence and one or more insertion sites for inserting a guide sequence upstream of the tracr mate sequence, wherein when expressed, the guide sequence directs sequence-specific binding of a CRISPR complex to a target sequence in a eukaryotic cell, wherein the CRISPR complex comprises a CRISPR enzyme complexed with (1) the guide sequence that is hybridized to the target sequence, and (2) the tracr mate sequence that is hybridized to the tracr sequence, and/or (b) a second regulatory element operably linked to an enzyme-coding sequence encoding said CRISPR enzyme comprising a nuclear localization sequence. In some embodiments, the kit comprises components (a) and (b) located on the same or different vectors of the system. In some embodiments, component (a) further comprises the tracr sequence downstream of the tracr mate sequence under the control of the first regulatory element. In some embodiments, component (a) further comprises two or more guide sequences operably linked to the first regulatory element, wherein when expressed, each of the two or more guide sequences direct sequence specific binding of a CRISPR complex to a different target sequence in a eukaryotic cell. In some embodiments, the system further comprises a third regulatory element, such as a polymerase III promoter, operably linked to said tracr sequence. In some embodiments, the tracr sequence exhibits at least 50%, 60%, 70%, 80%, 90%, 95%, or 99% of sequence complementarity along the length of the tracr mate sequence when optimally aligned. In some embodiments, the CRISPR enzyme comprises one or more nuclear localization sequences of sufficient strength to drive accumulation of said CRISPR enzyme in a detectable amount in the nucleus of a eukaryotic cell. In some embodiments, the CRISPR enzyme is a type II CRISPR system enzyme. In some embodiments, the CRISPR enzyme is a Cas9 enzyme. In some embodiments, the CRISPR enzyme is codon-optimized for expression in a eukmyotic cell. In some embodiments, the CRISPR enzyme directs cleavage of one or two strands at the location of the target sequence. In some embodiments, the CRISPR enzyme lacks DNA strand cleavage activity. In some embodiments, the first regulatory element is a polymerase III promoter. In some embodiments, the second regulatory element is a polymerase II promoter. In some embodiments, the guide sequence is at least 15, 16, 17, 18, 19, 20, 25 nucleotides, or between 10-30, or between 15-25, or between 15-20 nucleotides in length. In some embodiments, fewer than 50%, 40%, 30%, 20%, 20%, 10% or 5% of the nucleotides of the guide sequence participate in self-complementary base-pairing when optimally folded.

[0241] In one aspect, the invention provides a computer system for selecting a candidate target sequence within a nucleic acid sequence in a eukaryotic cell for targeting by a CRISPR complex. In some embodiments, the computer system comprises (a) a memory unit configured to receive and/or store said nucleic acid sequence; and (b) one or more processors alone or in combination programmed to (i) locate a CRISPR motif sequence within said nucleic acid sequence, and (ii) select a sequence adjacent to said located CRISPR motif sequence as the candidate target sequence to which the CRISPR complex binds. In some embodiments, said locating step comprises identifying a CRISPR motif sequence located less than about 10000 nucleotides away from said target sequence, such as less than about 5000, 2500, 1000, 500, 250, 100, 50, 25, or fewer nucleotides away from the target sequence. In some embodiments, the candidate target sequence is at least 10, 15, 20, 25, 30, or more nucleotides in length. In some embodiments, the nucleotide at the 3′ end of the candidate target sequence is located no more than about 10 nucleotides upstream of the CRISPR motif sequence, such as no more than 5, 4, 3, 2, or 1 nucleotides. In some embodiments, the nucleic acid sequence in the eukaryotic cell is endogenous to the eukaryotic genome. In some embodiments, the nucleic acid sequence in the eukaryotic cell is exogenous to the eukaryotic genome.

[0242] In one aspect, the invention provides a computer-readable medium comprising codes that, upon execution by one or more processors, implements a method of selecting a candidate target sequence within a nucleic acid sequence in a eukaryotic cell for targeting by a CRISPR complex, said method comprising: (a) locating a CRISPR motif sequence within said nucleic acid sequence, and (b) selecting a sequence adjacent to said located CRISPR motif sequence as the candidate target sequence to which the CRISPR complex binds. In some embodiments, said locating comprises locating a CRISPR motif sequence that is less than about 5000, 2500, 1000, 500, 250, 100, 50, 25, or fewer nucleotides away from said target sequence. In some embodiments, the candidate target sequence is at least 10, 15, 20, 25, 30, or more nucleotides in length. In some embodiments, the nucleotide at the 3′ end of the candidate target sequence is located no more than about 10 nucleotides upstream of the CRISPR motif sequence, such as no more than 5, 4, 3, 2, or 1 nucleotides. In some embodiments, the nucleic acid sequence in the eukaryotic cell is endogenous to the eukaryotic genome. In some embodiments, the nucleic acid sequence in the eukaryotic cell is exogenous to the eukaryotic genome.

[0243] In one aspect, the invention provides a method of modifying a target polynucleotide in a eukaryotic cell. In some embodiments, the method comprises allowing a CRISPR complex to bind to the target polynucleotide to effect cleavage of said target polynucleotide thereby modifying the target polynucleotide, wherein the CRISPR complex comprises a CRISPR enzyme complexed with a guide sequence hybridized to a target sequence within said target polynucleotide, wherein said guide sequence is linked to a tracr mate sequence which in turn hybridizes to a tracr sequence. In some embodiments, said cleavage comprises cleaving one or two strands at the location of the target sequence by said CRISPR enzyme. In some embodiments, said cleavage results in decreased transcription of a target gene. In some embodiments, the method further comprises repairing said cleaved target polynucleotide by homologous recombination with an exogenous template polynucleotide, wherein said repair results in a mutation comprising an insertion, deletion, or substitution of one or more nucleotides of said target polynucleotide. In some embodiments, said mutation results in one or more amino acid changes in a protein expressed from a gene comprising the target sequence. In some embodiments, the method further comprises delivering one or more vectors to said eukaryotic cell, wherein the one or more vectors drive expression of one or more of: the CRISPR enzyme, the guide sequence linked to the tracr mate sequence, and the tracr sequence. In some embodiments, said vectors are delivered to the eukaryotic cell in a subject. In some embodiments, said modifying takes place in said eukaryotic cell in a cell culture. In some embodiments, the method further comprises isolating said eukaryotic cell from a subject prior to said modifying. In some embodiments, the method further comprises returning said eukaryotic cell and/or cells derived therefrom to said subject.

[0244] In one aspect, the invention provides a method of modifying expression of a polynucleotide in a eukaryotic cell. In some embodiments, the method comprises allowing a CRISPR complex to bind to the polynucleotide such that said binding results in increased or decreased expression of said polynucleotide; wherein the CRISPR complex comprises a CRISPR enzyme complexed with a guide sequence hybridized to a target sequence within said polynucleotide, wherein said guide sequence is linked to a tracr mate sequence which in turn hybridizes to a tracr sequence. In some embodiments, the method further comprises delivering one or more vectors to said eukaryotic cells, wherein the one or more vectors drive expression of one or more of: the CRISPR enzyme, the guide sequence linked to the tracr mate sequence, and the tracr sequence.

[0245] In one aspect, the invention provides a method of generating a model eukaryotic cell comprising a mutated disease gene. In some embodiments, a disease gene is any gene associated an increase in the risk of having or developing a disease. In some embodiments, the method comprises (a) introducing one or more vectors into a eukaryotic cell, wherein the one or more vectors drive expression of one or more of: a CRISPR enzyme, a guide sequence linked to a tracr mate sequence, and a tracr sequence; and (b) allowing a CRISPR complex to bind to a target polynucleotide to effect cleavage of the target polynucleotide within said disease gene, wherein the CRISPR complex comprises the CRISPR enzyme complexed with (1) the guide sequence that is hybridized to the target sequence within the target polynucleotide, and (2) the tracr mate sequence that is hybridized to the tracr sequence, thereby generating a model eukaryotic cell comprising a mutated disease gene. In some embodiments, said cleavage comprises cleaving one or two strands at the location of the target sequence by said CRISPR enzyme. In some embodiments, said cleavage results in decreased transcription of a target gene. In some embodiments, the method further comprises repairing said cleaved target polynucleotide by homologous recombination with an exogenous template polynucleotide, wherein said repair results in a mutation comprising an insertion, deletion, or substitution of one or more nucleotides of said target polynucleotide. In some embodiments, said mutation results in one or more amino acid changes in a protein expression from a gene comprising the target sequence.

[0246] In one aspect, the invention provides a method for developing a biologically active agent that modulates a cell signaling event associated with a disease gene. In some embodiments, a disease gene is any gene associated an increase in the risk of having or developing a disease. In some embodiments, the method comprises (a) contacting a test compound with a model cell of any one of the described embodiments; and (b) detecting a change in a readout that is indicative of a reduction or an augmentation of a cell signaling event associated with said mutation in said disease gene, thereby developing said biologically active agent that modulates said cell signaling event associated with said disease gene.

[0247] In one aspect, the invention provides a recombinant polynucleotide comprising a guide sequence upstream of a tracr mate sequence, wherein the guide sequence when expressed directs sequence-specific binding of a CRISPR complex to a corresponding target sequence present in a eukaryotic cell. In some embodiments, the target sequence is a viral sequence present in a eukaryotic cell. In some embodiments, the target sequence is a proto-oncogene or an oncogene.

[0248] In one aspect, the invention provides a vector system comprising one or more vectors. In some embodiments, the vector system comprises (a) a first regulatory element operably linked to a tracr mate sequence and one or more insertion sites for inserting a guide sequence upstream of the tracr mate sequence, wherein when expressed, the guide sequence directs sequence-specific binding of a CRISPR complex to a target sequence in a eukaryotic cell, wherein the CRISPR complex comprises a CRISPR enzyme complexed with (1) the guide sequence that is hybridized to the target sequence, and (2) the tracr mate sequence that is hybridized to the tracr sequence; and (b) a second regulatory element operably linked to an enzyme-coding sequence encoding said CRISPR enzyme comprising a nuclear localization sequence; wherein components (a) and (b) are located on the same or different vectors of the system.

[0249] In general, the term “vector” refers to a nucleic acid molecule capable of transporting another nucleic acid to which it has been linked. Vectors include, but are not limited to, nucleic acid molecules that are single-stranded, double-stranded, or partially double-stranded; nucleic acid molecules that comprise one or more free ends, no free ends (e.g. circular); nucleic acid molecules that comprise DNA, RNA, or both; and other varieties of polynucleotides known in the art. One type of vector is a “plasmid,” which refers to a circular double stranded DNA loop into which additional DNA segments can be inserted, such as by standard molecular cloning techniques. Another type of vector is a viral vector, wherein virally-derived DNA or RNA sequences are present in the vector for packaging into a virus (e.g. retroviruses, replication defective retroviruses, adenoviruses, replication defective adenoviruses, and adeno-associated viruses). Viral vectors also include polynucleotides carried by a virus for transfection into a host cell. Certain vectors arc capable of autonomous replication in a host cell into which they are introduced (e.g. bacterial vectors having a bacterial origin of replication and episomal mammalian vectors). Other vectors (e.g., non-episomal mammalian vectors) are integrated into the genome of a host cell upon introduction into the host cell, and thereby are replicated along with the host genome. Moreover, certain vectors are capable of directing the expression of genes to which they are operatively-linked. Such vectors are referred to herein as “expression vectors.” Common expression vectors of utility in recombinant DNA techniques are often in the form of plasmids.

[0250] Recombinant expression vectors can comprise a nucleic acid of the invention in a form suitable for expression of the nucleic acid in a host cell, which means that the recombinant expression vectors include one or more regulatory elements, which may be selected on the basis of the host cells to be used for expression, that is operatively-linked to the nucleic acid sequence to be expressed. Within a recombinant expression vector, “operably linked” is intended to mean that the nucleotide sequence of interest is linked to the regulatory element(s) in a manner that allows for expression of the nucleotide sequence (e.g. in an in vitro transcription/translation system or in a host cell when the vector is introduced into the host cell).

[0251] The term “regulatory element” is intended to include promoters, enhancers, internal ribosomal entry sites (IRES), and other expression control elements (e.g. transcription termination signals, such as polyadenylation signals and poly-U sequences). Such regulatory elements are described, for example, in Goeddel, GENE EXPRESSION TECHNOLOGY: METHODS IN ENZYMOLOGY 185, Academic Press, San Diego, Calif. (1990). Regulatory elements include those that direct constitutive expression of a nucleotide sequence in many types of host cell and those that direct expression of the nucleotide sequence only in certain host cells (e.g., tissue-specific regulatory sequences). A tissue-specific promoter may direct expression primarily in a desired tissue of interest, such as muscle, neuron, bone, skin, blood, specific organs (e.g. liver, pancreas), or particular cell types (e.g. lymphocytes). Regulatory elements may also direct expression in a temporal-dependent manner, such as in a cell-cycle dependent or developmental stage-dependent manner, which may or may not also be tissue or cell-type specific. In some embodiments, a vector comprises one or more pol III promoter (e.g. 1, 2, 3, 4, 5, or more pol I promoters), one or more pol II promoters (e.g. 1, 2, 3, 4, 5, or more pol II promoters), one or more pol I promoters (e.g. 1, 2, 3, 4, 5, or more pol I promoters), or combinations thereof. Examples of pol III promoters include, but are not limited to, U6 and H1 promoters. Examples of pol II promoters include, but are not limited to, the retroviral Rous sarcoma virus (RSV) LTR promoter (optionally with the RSV enhancer), the cytomegalovirus (CMV) promoter (optionally with the CMV enhancer) [see, e.g., Boshart et al, Cell, 41:521-530 (1985)], the SV40 promoter, the dihydrofolate reductase promoter, the 0-actin promoter, the phosphoglycerol kinase (PGK) promoter, and the EF1α promoter. Also encompassed by the term “regulatory element” are enhancer elements, such as WPRE; CMV enhancers; the R-U5′ segment in LTR of HTLV-I (Mol. Cell. Biol., Vol. 8(1), p. 466-472, 1988); SV40 enhancer; and the intron sequence between exons 2 and 3 of rabbit β-globin (Proc. Natl. Acad. Sci. USA., Vol. 78(3), p. 1527-31, 1981). It will be appreciated by those skilled in the art that the design of the expression vector can depend on such factors as the choice of the host cell to be transformed, the level of expression desired, etc. A vector can be introduced into host cells to thereby produce transcripts, proteins, or peptides, including fusion proteins or peptides, encoded by nucleic acids as described herein (e.g., clustered regularly interspersed short palindromic repeats (CRISPR) transcripts, proteins, enzymes, mutant forms thereof, fusion proteins thereof, etc.).

[0252] Vectors can be designed for expression of CRISPR transcripts (e.g. nucleic acid transcripts, proteins, or enzymes) in prokaryotic or eukaryotic cells. For example, CRISPR transcripts can be expressed in bacterial cells such as Escherichia coli, insect cells (using baculovirus expression vectors), yeast cells, or mammalian cells. Suitable host cells are discussed further in Goeddel, GENE EXPRESSION TECHNOLOGY: METHODS IN ENZYMOLOGY 185, Academic Press, San Diego, Calif. (1990). Alternatively, the recombinant expression vector can be transcribed and translated in vitro, for example using T7 promoter regulatory sequences and T7 polymerase.

[0253] Vectors may be introduced and propagated in a prokaryote. In some embodiments, a prokaryote is used to amplify copies of a vector to be introduced into a eukaryotic cell or as an intermediate vector in the production of a vector to be introduced into a eukaryotic cell (e.g. amplifying a plasmid as part of a viral vector packaging system). In some embodiments, a prokaryote is used to amplify copies of a vector and express one or more nucleic acids, such as to provide a source of one or more proteins for delivery to a host cell or host organism. Expression of proteins in prokaryotes is most often carried out in Escherichia coli with vectors containing constitutive or inducible promoters directing the expression of either fusion or non-fusion proteins. Fusion vectors add a number of amino acids to a protein encoded therein, such as to the amino terminus of the recombinant protein. Such fusion vectors may serve one or more purposes, such as: (i) to increase expression of recombinant protein; (ii) to increase the solubility of the recombinant protein; and (iii) to aid in the purification of the recombinant protein by acting as a ligand in affinity purification. Often, in fusion expression vectors, a proteolytic cleavage site is introduced at the junction of the fusion moiety and the recombinant protein to enable separation of the recombinant protein from the fusion moiety subsequent to purification of the fusion protein. Such enzymes, and their cognate recognition sequences, include Factor Xa, thrombin and enterokinase. Example fusion expression vectors include pGEX (Pharmacia Biotech Inc; Smith and Johnson, 1988. Gene 67: 31-40), pMAL (New England Biolabs, Beverly, Mass.) and pRIT5 (Pharmacia, Piscataway, N.J.) that fuse glutathione S-transferase (GST), maltose E binding protein, or protein A, respectively, to the target recombinant protein.

[0254] Examples of suitable inducible non-fusion E. coli expression vectors include pTrc (Amrann et al., (1988) Gene 69:301-315) and pET 11d (Studier et al., GENE EXPRESSION TECHNOLOGY: METHODS IN ENZYMOLOGY 185, Academic Press, San Diego, Calif. (1990) 60-89).

[0255] In some embodiments, a vector is a yeast expression vector. Examples of vectors for expression in yeast Saccharomyces cerivisae include pYepSecl (Baldari, et al., 1987. EMBO J. 6: 229-234), pMFa (Kuijan and Herskowitz, 1982, Cell 30: 933-943), pJRY88 (Schultz et al., 1987. Gene 54: 113-123), pYES2 (Invitrogen Corporation, San Diego, Calif.), and picZ (InVitrogen Corp, San Diego, Calif.).

[0256] In some embodiments, a vector drives protein expression in insect cells using baculovirus expression vectors. Baculovirus vectors available for expression of proteins in cultured insect cells (e.g., SF9 cells) include the pAc series (Smith, et al., 1983. Mol. Cell. Biol. 3: 2156-2165) and the pVL series (Lucklow and Summers, 1989. Virology 170: 31-39).

[0257] In some embodiments, a vector is capable of driving expression of one or more sequences in mammalian cells using a mammalian expression vector. Examples of mammalian expression vectors include pCDM8 (Seed, 1987. Nature 329: 840) and pMT2PC (Kaufman, et al., 1987. EMBO J. 6: 187-195). When used in mammalian cells, the expression vector's control functions are typically provided by one or more regulatory elements. For example, commonly used promoters are derived from polyoma, adenovirus 2, cytomegalovirus, simian virus 40, and others disclosed herein and known in the art. For other suitable expression systems for both prokaryotic and eukaryotic cells see, e.g., Chapters 16 and 17 of Sambrook, et al., MOLECULAR CLONING: A LABORATORY MANUAL. 2nd ed., Cold Spring Harbor Laboratory, Cold Spring Harbor Laboratory Press, Cold Spring Harbor, N.Y., 1989.

[0258] In some embodiments, the recombinant mammalian expression vector is capable of directing expression of the nucleic acid preferentially in a pmiicular cell type (e.g., tissue-specific regulatory elements are used to express the nucleic acid). Tissue-specific regulatory elements are known in the art. Non-limiting examples of suitable tissue-specific promoters include the albumin promoter (liver-specific; Pinkert, et al., 1987. Genes Dev. 1: 268-277), lymphoid-specific promoters (Calame and Eaton, 1988. Adv, Immunol. 43:235-275), in particular promoters off cell receptors (Winoto and Baltimore, 1989. EMBO J. 8: 729-733) and immunoglobulins (Baneiji, et al., 1983. Cell 33: 729-740; Queen and Baltimore, 1983. Cell 33: 741-748), neuron-specific promoters (e.g., the neurofilament promoter; Byrne and Ruddle, 1989. Proc. Natl. Acad. Sci. USA 86: 5473-5477), pancreas-specific promoters (Edlund, et al., 1985. Science 230: 912-916), and mammary gland-specific promoters (e.g., milk whey promoter; U.S. Pat. No. 4,873,316 and European Application Publication No. 264,166). Developmentally-regulated promoters are also encompassed, e.g., the murine hox promoters (Kessel and Gruss, 1990. Science 249: 374-379) and the α-fetoprotein promoter (Campes and Tilghman, 1989. Genes Dev. 3: 537-546).

[0259] In some embodiments, a regulatory element is operably linked to one or more elements of a CRISPR system so as to drive expression of the one or more elements of the CRISPR system. In general, CRISPRs (Clustered Regularly Interspaced Short Palindromic Repeats), also known as SPIDRs (SPacer Interspersed Direct Repeats), constitute a family of DNA loci that are usually specific to a particular bacterial species. The CRISPR locus comprises a distinct class of interspersed short sequence repeats (SSRs) that were recognized in E. coli (Ishino et al., J. Bacteriol., 169:5429-5433 [1987]; and Nakata et al., J. Bacteriol., 171:3553-3556 [1989]), and associated genes. Similar interspersed SSRs have been identified in Haloferax mediterranei, Streptococcus pyogenes, Anabaena, and Mycobacterium tuberculosis (See, Groenen et al., Mol. Microbiol., 10:1057-1065 [1993]; Hoc et al., Emerg. Infect. Dis., 5:254-263 [1999]; Mascpohl et al., Biochim. Biophys. Acta 1307:26-30 [1996]; and Mojica et al., Mol. Microbiol., 17:85-93 [1995]). The CRISPR loci typically differ from other SSRs by the structure of the repeats, which have been termed short regularly spaced repeats (SRSRs) (Janssen et al., OMICS J. Integ. Biol., 6:23-33 [2002]; and Mojica et al., Mol. Microbiol., 36:244-246 [2000]). In general, the repeats are short elements that occur in clusters that are regularly spaced by unique intervening sequences with a substantially constant length (Mojica et al., [2000], supra). Although the repeat sequences are highly conserved between strains, the number of interspersed repeats and the sequences of the spacer regions typically differ from strain to strain (van Embden et al., J. Bacterial., 182:2393-2401 [2000]). CRISPR loci have been identified in more than 40 prokaryotes (See e.g., Jansen et al., Mol. Microbiol., 43:1565-1575 [2002]; and Mojica et al., [2005]) including, but not limited to Aeropyrum, Pyrobaculum, Sulfolobus, Archaeoglobus, Halocarcula, Methanobacterium, Methanococcus, Methanosarcina, Methanopyrus, Pyrococcus, Picrophilus, Thermoplasma, Corvnebacteriumn, Mycobacterium, Streptomyces, Aquifex, Porphyromonas, Chlorobium, Thermus, Bacillus, Listeria, Staphylococcus, Clostridium, Thennoanaerobacter, Mycoplasma, Fusobacterium, Azarcus, Chromobacterium, Neisseria, Nitrosomonas, Desulfovibrio, Geobacter, Mvxococcus, Campylobacter, Wolinella, Acinetobacter, Erwinia, Escherichia, Legionella, Methylococcus, Pasteurella, Photobacterium, Salmonella, Xanthomonas, Yersinia, Treponemna, and Thermotoga.

[0260] In general, “CRISPR system” refers collectively to transcripts and other elements involved in the expression of or directing the activity of CRISPR-associated (“Cas”) genes, including sequences encoding a Cas gene, a tracr (trans-activating CRISPR) sequence (e.g. tracrRNA or an active partial tracrRNA), a tracr-mate sequence (encompassing a “direct repeat” and a tracrRNA-processed partial direct repeat in the context of an endogenous CRISPR system), a guide sequence (also referred to as a “spacer” in the context of an endogenous CRISPR system), or other sequences and transcripts from a CRISPR locus. In some embodiments, one or more elements of a CRISPR system is derived from a type I, type II, or type III CRISPR system. In some embodiments, one or more elements of a CRISPR system is derived from a particular organism comprising an endogenous CRISPR system, such as Streptococcus pyogenes. In general, a CRISPR system is characterized by elements that promote the formation of a CRISPR complex at the site of a target sequence (also referred to as a protospacer in the context of an endogenous CRISPR system). In the context of formation of a CRISPR complex, “target sequence” refers to a sequence to which a guide sequence is designed to have complementarity, where hybridization between a target sequence and a guide sequence promotes the formation of a CRISPR complex. A target sequence may comprise any polynucleotide, such as DNA or RNA polynucleotides. In some embodiments, a target sequence is located in the nucleus or cytoplasm of a cell.

[0261] Typically, in the context of an endogenous CRISPR system, formation of a CRISPR complex (comprising a guide sequence hybridized to a target sequence and complexed with one or more Cas proteins) results in cleavage of one or both strands in or near (e.g. within 1, 2, 3, 4, 5, 6, 7, 8, 9, 10, 20, 50, or more base pairs from) the target sequence. Without wishing to be bound by theory, all or a portion of the tracr sequence may also form part of a CRISPR complex, such as by hybridization to all or a portion of a tracr mate sequence that is operably linked to the guide sequence. In some embodiments, one or more vectors driving expression of one or more elements of a CRISPR system are introduced into a host cell such that expression of the elements of the CRISPR system direct formation of a CRISPR complex at one or more target sites. For example, a Cas enzyme, a guide sequence linked to a tracr-mate sequence, and a tracr sequence could each be operably linked to separate regulatory elements on separate vectors. Alternatively, two or more of the elements expressed from the same or different regulatory elements, may be combined in a single vector, with one or more additional vectors providing any components of the CRISPR system not included in the first vector. CRISPR system elements that are combined in a single vector may be arranged in any suitable orientation, such as one element located 5′ with respect to (“upstream” of) or 3′ with respect to (“downstream” of) a second element. The coding sequence of one element may be located on the same or opposite strand of the coding sequence of a second element, and oriented in the same or opposite direction. In some embodiments, a single promoter drives expression of a transcript encoding a CRISPR enzyme and one or more of the guide sequence, tracr mate sequence (optionally operably linked to the guide sequence), and a tracr sequence embedded within one or more intron sequences (e.g. each in a different intron, two or more in at least one intron, or all in a single intron). In some embodiments, the CRISPR enzyme, guide sequence, tracr mate sequence, and tracr sequence are operably linked to and expressed from the same promoter.

[0262] In some embodiments, a vector comprises one or more insertion sites, such as a restriction endonuclease recognition sequence (also referred to as a “cloning site”). In some embodiments, one or more insertion sites (e.g. about or more than about 1, 2, 3, 4, 5, 6, 7, 8, 9, 10, or more insertion sites) are located upstream and/or downstream of one or more sequence elements of one or more vectors. In some embodiments, a vector comprises an insertion site upstream of a tracr mate sequence, and optionally downstream of a regulatory element operably linked to the tracr mate sequence, such that following insertion of a guide sequence into the insertion site and upon expression the guide sequence directs sequence-specific binding of a CRISPR complex to a target sequence in a eukaryotic cell. In some embodiments, a vector comprises two or more insertion sites, each insertion site being located between two tracr mate sequences so as to allow insertion of a guide sequence at each site. In such an arrangement, the two or more guide sequences may comprise two or more copies of a single guide sequence, two or more different guide sequences, or combinations of these. When multiple different guide sequences are used, a single expression construct may be used to target CRISPR activity to multiple different, corresponding target sequences within a cell. For example, a single vector may comprise about or more than about 1, 2, 3, 4, 5, 6, 7, 8, 9, 10, 15, 20, or more guide sequences. In some embodiments, about or more than about 1, 2, 3, 4, 5, 6, 7, 8, 9, 10, or more such guide-sequence-containing vectors may be provided, and optionally delivered to a cell.

[0263] In some embodiments, a vector comprises a regulatory element operably linked to an enzyme-coding sequence encoding a CRISPR enzyme, such as a Cas protein. Non-limiting examples of Cas proteins include Cas1, Cas1B, Cas2, Cas3, Cas4. Cas5, Cas6, Cas7, Cas8. Cas9 (also known as Csn1 and Csx12), Cas10, Csy1, Csy2, Csy3, Cse1, Cse2, Csc1, Csc2, Csa5, Csn2, Csm2, Csm3, Csm4, Csm5, Csm6, Cmr1, Cmr3, Cmr4, Cmr5, Cmr-6, Csb1, Csb2, Csb3, Csx17, Csx14, Csx10, Csx16, CsaX, Csx3, Csx1, Csx15, Csf1, Csf2, Csf3, Csf4, homologues thereof, or modified versions thereof. In some embodiments, the unmodified CRISPR enzyme has DNA cleavage activity, such as Cas9. In some embodiments, the CRISPR enzyme directs cleavage of one or both strands at the location of a target sequence, such as within the target sequence and/or within the complement of the target sequence. In some embodiments, the CRISPR enzyme directs cleavage of one or both strands within about 1, 2, 3, 4, 5, 6, 7, 8, 9, 10, 15, 20, 25, 50, 100, 200, 500, or more base pairs from the first or last nucleotide of a target sequence. In some embodiments, a vector encodes a CRISPR enzyme that is mutated to with respect to a corresponding wild-type enzyme such that the mutated CRISPR enzyme lacks the ability to cleave one or both strands of a target polynucleotide containing a target sequence. For example, an aspartate-to-alanine substitution (D10A) in the RuvC I catalytic domain of Cas9 from S. pyogenes converts Cas9 from a nuclease that cleaves both strands to a nickase (cleaves a single strand). Other examples of mutations that render Cas9 a nickase include, without limitation, H840A, N854A, and N863A. As a further example, two or more catalytic domains of Cas9 (RuvC I, RuvC II, and RuvC III) may be mutated to produce a mutated Cas9 substantially lacking all DNA cleavage activity. In some embodiments, a D10A mutation is combined with one or more of H840A. N854A, or N863A mutations to produce a Cas9 enzyme substantially lacking all DNA cleavage activity. In some embodiments, a CRISPR enzyme is considered to substantially lack all DNA cleavage activity when the DNA cleavage activity of the mutated enzyme is less than about 25%, 10%, 5%, 1%, 0.1%, 0.01%, or lower with respect to its non-mutated form.

[0264] In some embodiments, an enzyme coding sequence encoding a CRISPR enzyme is codon optimized for expression in particular cells, such as eukaryotic cells. The eukaryotic cells may be those of or derived from a particular organism, such as a mammal, including but not limited to human, mouse, rat, rabbit, dog, or non-human primate. In general, codon optimization refers to a process of modifying a nucleic acid sequence for enhanced expression in the host cells of interest by replacing at least one codon (e.g. about or more than about 1, 2, 3, 4, 5, 10, 15, 20, 25, 50, or more codons) of the native sequence with codons that are more frequently or most frequently used in the genes of that host cell while maintaining the native amino acid sequence. Various species exhibit particular bias for certain codons of a particular amino acid. Codon bias (differences in codon usage between organisms) often correlates with the efficiency of translation of messenger RNA (mRNA), which is in turn believed to be dependent on, among other things, the properties of the codons being translated and the availability of particular transfer RNA (tRNA) molecules. The predominance of selected tRNAs in a cell is generally a reflection of the codons used most frequently in peptide synthesis. Accordingly, genes can be tailored for optimal gene expression in a given organism based on codon optimization. Codon usage tables are readily available, for example, at the “Codon Usage Database” available at www.kazusa.orjp/codon/ (visited Jul. 9, 2002), and these tables can be adapted in a number of ways. Sec Nakamura, Y., et al. “Codon usage tabulated from the international DNA sequence databases: status for the year 2000” Nucl. Acids Res. 28:292 (2000). Computer algorithms for codon optimizing a particular sequence for expression in a particular host cell are also available, such as Gene Forge (Aptagen; Jacobus, PA), are also available. In some embodiments, one or more codons (e.g. 1, 2, 3, 4, 5, 10, 15, 20, 25, 50, or more, or all codons) in a sequence encoding a CRISPR enzyme correspond to the most frequently used codon for a particular amino acid.

[0265] In some embodiments, a vector encodes a CRISPR enzyme comprising one or more nuclear localization sequences (NLSs), such as about or more than about 1, 2, 3, 4, 5, 6, 7, 8, 9, 10, or more NLSs. In some embodiments, the CRISPR enzyme comprises about or more than about 1, 2, 3, 4, 5, 6, 7, 8, 9, 10, or more NLSs at or near the amino-terminus, about or more than about 1, 2, 3, 4, 5, 6, 7, 8, 9, 10, or more NLSs at or near the carboxy-terminus, or a combination of these (e.g. one or more NLS at the amino-terminus and one or more NLS at the carboxy terminus). When more than one NLS is present, each may be selected independently of the others, such that a single NLS may be present in more than one copy and/or in combination with one or more other NLSs present in one or more copies. In some embodiments, an NLS is considered near the N- or C-terminus when the nearest amino acid of the NLS is within about 1, 2, 3, 4, 5, 10, 15, 20, 25, 30, 40, 50, or more amino acids along the polypeptide chain from the N- or C-terminus. Non-limiting examples of NLSs include an NLS sequence derived from: the NLS of the SV40 virus large T-antigen, having the amino acid sequence PKKKRKV (SEQ ID NO: 30); the NLS from nucleoplasmin (e.g. the nucleoplasmin bipartite NLS with the sequence KRPAATKKAGQAKKKK (SEQ ID NO: 31)); the c-myc NLS having the amino acid sequence PAAKRVKLD (SEQ ID NO: 32) or RQRRNELKRSP (SEQ ID NO: 33); the hRNPA1 M9 NLS having the sequence NQSSNFGPMKGGNFGGRSSGPYGGGGQYFAKPRNQGGY (SEQ ID NO: 34); the sequence RMRIZFKNKGKDTAELRRRRVEVSVELRKAKKDEQILKRRNV (SEQ ID NO: 35) of the IBB domain from importin-alpha; the sequences VSRKRPRP (SEQ ID NO: 36) and PPKKARED (SEQ ID NO: 37) of the myoma T protein; the sequence PQPKKKP (SEQ ID NO: 38) of human p53; the sequence SALIKKKKKMAP (SEQ ID NO: 39) of mouse c-ablIV; the sequences DRLRR (SEQ ID NO: 40) and PKQKKRK (SEQ ID NO: 41) of the influenza virus NSI; the sequence RKLKKKIKKL (SEQ ID NO: 42) of the Hepatitis virus delta antigen; the sequence REKKKFLKRR (SEQ ID NO: 43) of the mouse Mx1 protein; the sequence KRKGDEVDGVDEVAKKKSKK (SEQ ID NO: 44) of the human poly(ADP-ribose) polymerase; and the sequence RKCLQAGMNLEARKTKK (SEQ ID NO: 45) of the steroid hormone receptors (human) glucocorticoid.

[0266] In general, the one or more NLSs are of sufficient strength to drive accumulation of the CRISPR enzyme in a detectable amount in the nucleus of a eukaryotic cell. In general, strength of nuclear localization activity may derive from the number of NLSs in the CRISPR enzyme, the particular NLS(s) used, or a combination of these factors. Detection of accumulation in the nucleus may be performed by any suitable technique. For example, a detectable marker may be fused to the CRISPR enzyme, such that location within a cell may be visualized, such as in combination with a means for detecting the location of the nucleus (e.g. a stain specific for the nucleus such as DAPI). Cell nuclei may also be isolated from cells, the contents of which may then be analyzed by any suitable process for detecting protein, such as immunohistochemistry, Western blot, or enzyme activity assay. Accumulation in the nucleus may also be determined indirectly, such as by an assay for the effect of CRISPR complex formation (e.g. assay for DNA cleavage or mutation at the target sequence, or assay for altered gene expression activity affected by CRISPR complex formation and/or CRISPR enzyme activity), as compared to a control no exposed to the CRISPR enzyme or complex, or exposed to a CRISPR enzyme lacking the one or more NLSs.

[0267] In general, a guide sequence is any polynucleotide sequence having sufficient complementarity with a target polynucleotide sequence to hybridize with the target sequence and direct sequence-specific binding of a CRISPR complex to the target sequence. In some embodiments, the degree of complementarity between a guide sequence and its corresponding target sequence, when optimally aligned using a suitable alignment algorithm, is about or more than about 50%, 60%, 75%, 80%, 85%, 90%, 95%, 97.5%, 99%, or more. Optimal alignment may be determined with the use of any suitable algorithm for aligning sequences, non-limiting example of which include the Smith-Waterman algorithm, the Needleman-Wunsch algorithm, algorithms based on the Burrows-Wheeler Transform (e.g. the Burrows Wheeler Aligner), ClustalW, Clustal X, BLAT, Novoalign (Novocraft Technologies; available at www.novocraft.com). ELAND (Illumina, San Diego, Calif.), SOAP (available at soap.genomics.org.cn), and Maq (available at maq.sourceforge.net). In some embodiments, a guide sequence is about or more than about 5, 10, 11, 12, 13, 14, 15, 16, 17, 18, 19, 20, 21, 22, 23, 24, 25, 26, 27, 28, 29, 30, 35, 40, 45, 50, 75, or more nucleotides in length. In some embodiments, a guide sequence is less than about 75, 50, 45, 40, 35, 30, 25, 20, 15, 12, or fewer nucleotides in length. The ability of a guide sequence to direct sequence-specific binding of a CRISPR complex to a target sequence may be assessed by any suitable assay. For example, the components of a CRISPR system sufficient to form a CRISPR complex, including the guide sequence to be tested, may be provided to a host cell having the corresponding target sequence, such as by transfection with vectors encoding the components of the CRISPR sequence, followed by an assessment of preferential cleavage within the target sequence, such as by Surveyor assay as described herein. Similarly, cleavage of a target polynucleotide sequence may be evaluated in a test tube by providing the target sequence, components of a CRISPR complex, including the guide sequence to be tested and a control guide sequence different from the test guide sequence, and comparing binding or rate of cleavage at the target sequence between the test and control guide sequence reactions. Other assays are possible, and will occur to those skilled in the art.

[0268] A guide sequence may be selected to target any target sequence. In some embodiments, the target sequence is a sequence within a genome of a cell. Exemplary target sequences include those that are unique in the target genome. For example, for the S. pyogenes Cas9, a unique target sequence in a genome may include a Cas9 target site of the form MMMMMMMMNNNNNNNNNNNNXGG (SEQ ID NO: 514) where NNNNNNNNNNNNXGG (SEQ ID NO: 515) (N is A, G, T, or C; and X can be anything) has a single occurrence in the genome. A unique target sequence in a genome may include an S. pyogenes Cas9 target site of the form MMMMMMMMMNNNNNNNNNNNXGG (SEQ ID NO: 516) where NNNNNNNNNNNXGG (SEQ ID NO: 517) (N is A, G, T, or C; and X can be anything) has a single occurrence in the genome. For the S. thermophilus CRISPR1 Cas9, a unique target sequence in a genome may include a Cas9 target site of the form MMMMMMMMNNNNNNNNNNNNXXAGAAW (SEQ ID NO: 518) where NNNNNNNNNNNNXXAGAAW (SEQ ID NO: 519) (N is A, G, T, or C; X can be anything; and W is A or T) has a single occurrence in the genome. A unique target sequence in a genome may include an S. thermophilus CRISPR1 Cas9 target site of the form MMMMMMMMMNNNNNNNNNNNXXAGAAW (SEQ ID NO: 520) where NNNNNNNNNNNXXAGAAW (SEQ ID NO: 521) (N is A, G, T, or C; X can be anything; and W is A or T) has a single occurrence in the genome. For the S. pyogenes Cas9, a unique target sequence in a genome may include a Cas9 target site of the form MMMMMMMMNNNNNNNNNNNNXGGXG (SEQ ID NO: 522) where NNNNNNNNNNNNXGGXG (SEQ ID NO: 523) (N is A, G, T, or C; and X can be anything) has a single occurrence in the genome. A unique target sequence in a genome may include an S. pyogenes Cas9 target site of the form MMMMMMMMMNNNNNNNNNNNXGGXG (SEQ ID NO: 524) where NNNNNNNNNNNXGGXG (SEQ ID NO: 525) (N is A, G, T, or C; and X can be anything) has a single occurrence in the genome. In each of these sequences “M” may be A, G, T, or C, and need not be considered in identifying a sequence as unique.

[0269] In some embodiments, a guide sequence is selected to reduce the degree secondary structure within the guide sequence. In some embodiments, about or less than about 75%, 50%, 40%, 30%, 25%, 20%, 15%, 10%, 5%, 1%, or fewer of the nucleotides of the guide sequence participate in self-complementary base pairing when optimally folded. Optimal folding may be determined by any suitable polynucleotide folding algorithm. Some programs are based on calculating the minimal Gibbs free energy. An example of one such algorithm is mFold, as described by Zuker and Stiegler (Nucleic Acids Res. 9 (1981), 133-148). Another example folding algorithm is the online webserver RNAfold, developed at Institute for Theoretical Chemistry at the University of Vienna, using the centroid structure prediction algorithm (see e.g. A. R. Gruber et al., 2008, Cell 106(1): 23-24; and PA Carr and GM Church, 2009, Nature Biotechnology, 27(12): 1151-62).

[0270] In general, a tracr mate sequence includes any sequence that has sufficient complementarity with a tracr sequence to promote one or more of: (1) excision of a guide sequence flanked by tracr mate sequences in a cell containing the corresponding tracr sequence; and (2) formation of a CRISPR complex at a target sequence, wherein the CRISPR complex comprises the tract mate sequence hybridized to the tracr sequence. In general, degree of complementarity is with reference to the optimal alignment of the tracr mate sequence and tractr sequence, along the length of the shorter of the two sequences. Optimal alignment may be determined by any suitable alignment algorithm, and may further account for secondary structures, such as self-complementarity within either the tracr sequence or tracr mate sequence. In some embodiments, the degree of complementarity between the tracr sequence and tractr mate sequence along the length of the shorter of the two when optimally aligned is about or more than about 25%, 30%, 40%, 50%, 60%, 70%, 80%, 90%, 95%, 97.5%, 99%, or higher. Example illustrations of optimal alignment between a tracr sequence and a tracr mate sequence are provided in FIG. 24B AND 304B. In some embodiments, the tracr sequence is about or more than about 5, 6, 7, 8, 9, 10, 11, 12, 13, 14, 15, 16, 17, 18, 19, 20, 25, 30, 40, 50, or more nucleotides in length. In some embodiments, the tracr sequence and tracr mate sequence are contained within a single transcript, such that hybridization between the two produces a transcript having a secondary structure, such as a hairpin. An example illustration of such a hairpin structure is provided in the lower portion of FIG. 24B, where the portion of the sequence 5′ of the final “N’ and upstream of the loop corresponds to the tracr mate sequence, and the portion of the sequence 3′ of the loop corresponds to the tracr sequence. Further non-limiting examples of single polynucleotides comprising a guide sequence, a tracr mate sequence, and a tracr sequence are as follows (listed 5′ to 3′), where “N” represents a base of a guide sequence, the first block of lower case letters represent the tractr mate sequence, and the second block of lower case letters represent the tracr sequence, and the final poly-T sequence represents the transcription terminator: (1) NNNNNNNNNNNNNNNNNNNNgtttttgtactctcaagatttaGAAAtaaatcttgcagaagctacaaagataaggctt catgccgaaatc aacaccctgtcattttatggcagggtgttttcgttatttaaTTTTTT (SEQ ID NO: 526); (2) NNNNNNNNNNNNNNNNNNNNgtttttgtactctcaGAAAtgcagaagctacaaagataaggcttcatgccgaaatca acaccctgtcatt ttatggcagggtgttttcgttatttaaTTTTT (SEQ ID NO: 527); (3) NNNNNNNNNNNNNNNNNNNNgtttttgtactctcaGAAAtgcagaagctacaaagataaggcttcatgccgaaatca acaccctgtcattttatggcagggtgtTTTTTT (SEQ ID NO: 528); (4) NNNNNNNNNNgttttagagctaGAAAtagcaagttaaataaggctagtccgttatcaacttgaaaa agtggcaccgagtcggtgcTTTTTT (SEQ ID NO: 529); (5) NNNNNNNNNNNNNNNNNNNNgttttagagctaGAAATAGcaagttaaaataaggctagtccgttatcaacttgaa aaagtgTTTTTT (SEQ ID NO: 530); and (6) NNNNNNNNNNNNNNNNNNNNgttttagagctagAAATAGcaagttaaaataaggctagtccgttatcaTTTTT TTT (SEQ ID NO: 531). In some embodiments, sequences (1) to (3) are used in combination with Cas9 from S. thermophilus CRISPR1. In some embodiments, sequences (4) to (6) are used in combination with Cas9 from S. pyogenes. In some embodiments, the tracr sequence is a separate transcript from a transcript comprising the tracr mate sequence (such as illustrated in the top portion of FIG. 24B).

[0271] In some embodiments, a recombination template is also provided. A recombination template may be a component of another vector as described herein, contained in a separate vector, or provided as a separate polynucleotide. In some embodiments, a recombination template is designed to serve as a template in homologous recombination, such as within or near a target sequence nicked or cleaved by a CRISPR enzyme as a part of a CRISPR complex. A template polynucleotide may be of any suitable length, such as about or more than about 10, 15, 20, 25, 50, 75, 100, 150, 200, 500, 1000, or more nucleotides in length. In some embodiments, the template polynucleotide is complementary to a portion of a polynucleotide comprising the target sequence. When optimally aligned, a template polynucleotide might overlap with one or more nucleotides of a target sequences (e.g. about or more than about 1, 5, 10, 15, 20, or more nucleotides). In some embodiments, when a template sequence and a polynucleotide comprising a target sequence are optimally aligned, the nearest nucleotide of the template polynucleotide is within about 1, 5, 10, 15, 20, 25, 50, 75, 100, 200, 300, 400, 500, 1000, 5000, 10000, or more nucleotides from the target sequence.

[0272] In some embodiments, the CRISPR enzyme is part of a fusion protein comprising one or more heterologous protein domains (e.g. about or more than about 1, 2, 3, 4, 5, 6, 7, 8, 9, 10, or more domains in addition to the CRISPR enzyme). A CRISPR enzyme fusion protein may comprise any additional protein sequence, and optionally a linker sequence between any two domains. Examples of protein domains that may be fused to a CRISPR enzyme include, without limitation, epitope tags, reporter gene sequences, and protein domains having one or more of the following activities: methylase activity, demethylase activity, transcription activation activity, transcription repression activity, transcription release factor activity, histone modification activity, RNA cleavage activity and nucleic acid binding activity. Non-limiting examples of epitope tags include histidine (His) tags, V5 tags, FLAG tags, influenza hemagglutinin (HA) tags, Myc tags, VSV-G tags, and thioredoxin (Trx) tags. Examples of reporter genes include, but are not limited to, glutathione-S-transferase (GST), horseradish peroxidase (HRP), chloramphenicol acetyltransferase (CAT) beta-galactosidase, beta-glucuronidase, luciferase, green fluorescent protein (GFP), HcRed, DsRed, cyan fluorescent protein (CFP), yellow fluorescent protein (YFP), and autofluorescent proteins including blue fluorescent protein (BFP). A CRISPR enzyme may be fused to a gene sequence encoding a protein or a fragment of a protein that bind DNA molecules or bind other cellular molecules, including but not limited to maltose binding protein (MBP), S-tag, Lex A DNA binding domain (DBD) fusions, GAL4 DNA binding domain fusions, and herpes simplex virus (HSV) BP16 protein fusions. Additional domains that may form part of a fusion protein comprising a CRISPR enzyme are described in US20110059502, incorporated herein by reference. In some embodiments, a tagged CRISPR enzyme is used to identify the location of a target sequence.

[0273] In some embodiments, a CRISPR enzyme may form a component of a Light Inducible Transcriptional Effector (LITE) to direct changes in transcriptional activity in a sequence-specific manner. The components of a light may include a CRISPR enzyme, a light-responsive cytochrome heterodimer (e.g. from Arabidopsis thaliana), and a transcriptional activation/repression domain. A guide sequence may be selected to direct CRISPR complex formation at a promoter sequence of a gene of interest. The CRISPR enzyme may be fused to one half of the cryptochrome heterodimer (cryptochrome-2 or CIB1), while the remaining cryptochrome partner is fused to a transcriptional effector domain. Effector domains may be either activators, such as VP16, VP64, or p65, or repressors, such as KRAB, EnR, or SID. In a LITE's unstimulated state, the CRISPR-cryptochrome2 protein localizes to the promoter of the gene of interest, but is not bound to the CIB1-effector protein. Upon stimulation of a LITE with blue spectrum light, cryptochrome-2 becomes activated, undergoes a conformational change, and reveals its binding domain. CIB1, in turn, binds to cryptochrome-2 resulting in localization of the effector domain to the promoter region of the gene of interest and initiating gene overexpression or silencing. Activator and repressor domains may selected on the basis of species, strength, mechanism, duration, size, or any number of other parameters. Preferred effector domains include, but are not limited to, a transposase domain, integrase domain, recombinase domain, resolvase domain, invertase domain, protease domain, DNA methyltransferase domain, DNA demethylase domain, histone acetylase domain, histone deacetylases domain, nuclease domain, repressor domain, activator domain, nuclear-localization signal domains, transcription-protein recruiting domain, cellular uptake activity associated domain, nucleic acid binding domain or antibody presentation domain. Further examples of inducible DNA binding proteins and methods for their use are provided in U.S. 61/736,465, which is hereby incorporated by reference in its entirety.

[0274] In some aspects, the invention provides methods comprising delivering one or more polynucleotides, such as or one or more vectors as described herein, one or more transcripts thereof, and/or one or proteins transcribed therefrom, to a host cell. In some aspects, the invention further provides cells produced by such methods, and animals comprising or produced from such cells. In some embodiments, a CRISPR enzyme in combination with (and optionally complexed with) a guide sequence is delivered to a cell. Conventional viral and non-viral based gene transfer methods can be used to introduce nucleic acids in mammalian cells or target tissues. Such methods can be used to administer nucleic acids encoding components of a CRISPR system to cells in culture, or in a host organism. Non-viral vector delivery systems include DNA plasmids, RNA (e.g. a transcript of a vector described herein), naked nucleic acid, and nucleic acid complexed with a delivery vehicle, such as a liposome. Viral vector delivery systems include DNA and RNA viruses, which have either episomal or integrated genomes after delivery to the cell. For a review of gene therapy procedures, see Anderson, Science 256:808-813 (1992); Nabel & Feigner, TIBTECH 11:211-217 (1993); Mitani & Caskey, TIBTECH 11:162-166 (1993); Dillon, TIBTECH 11:167-175 (1993); Miller, Nature 357:455-460 (1992); Van Brunt, Biotechnology 6(10):1149-1154 (1988); Vigne, Restorative Neurology and Neuroscience 8:35-36 (1995); Kremer & Perricaudet, British Medical Bulletin 51(1):31-44 (1995); Haddada et al., in Cuttent Topics in Microbiology and Immunology Doerfler and Bohm (eds) (1995); and Yu et al., Gene Therapy 1:13-26 (1994).

[0275] Methods of non-viral delivery of nucleic acids include lipofection, microinjection, biolistics, virosomes, liposomes, immunoliposomes, polycation or lipid:nucleic acid conjugates, naked DNA, artificial virions, and agent-enhanced uptake of DNA. Lipofection is described in e.g., U.S. Pat. Nos. 5,049,386, 4,946,787; and 4,897,355) and lipofection reagents are sold commercially (e.g., Transfectam™ and Lipofectin™). Cationic and neutral lipids that are suitable for efficient receptor-recognitionlipofection of polynucleotides include those of Felgner, WO91/17424; WO 91/16024. Delivery can be to cells (e.g. in vitro or ex vivo administration) or target tissues (e.g. in vivo administration).

[0276] The preparation of lipid:nucleic acid complexes, including targeted liposomes such as immunolipid complexes, is well known to one of skill in the art (see, e.g., Crystal, Science 270:404-410 (1995); Blaese et al., Cancer Gene Ther. 2:291-297 (1995); Behr et al., Bioconjugate Chem. 5:382-389(1994); Remy et al., Bioconjugate Chem. 5:647-654(1994); Gao et al., Gene Therapy 2:710-722 (1995); Ahmad et al., Cancer Res. 52:4817-4820 (1992); U.S. Pat. Nos. 4,186,183, 4,217,344, 4,235,871, 4,261.975, 4,485,054, 4, 501, 728, 4,774,085, 4,837,028, and 4,946,787).

[0277] The use of RNA or DNA viral based systems for the delivery of nucleic acids take advantage of highly evolved processes for targeting a virus to specific cells in the body and trafficking the viral payload to the nucleus. Viral vectors can be administered directly to patients (in vivo) or they can be used to treat cells in vitro, and the modified cells may optionally be administered to patients (ex vivo). Conventional viral based systems could include retroviral, lentivirus, adenoviral, adeno-associated and herpes simplex virus vectors for gene transfer. Integration in the host genome is possible with the retrovirus, lentivirus, and adeno-associated virus gene transfer methods, often resulting in long term expression of the inserted transgene. Additionally, high transduction efficiencies have been observed in many different cell types and target tissues.

[0278] The tropism of a retrovirus can be altered by incorporating foreign envelope proteins, expanding the potential target population of target cells. Lentiviral vectors are retroviral vectors that are able to transduce or infect non-dividing cells and typically produce high viral titers. Selection of a retroviral gene transfer system would therefore depend on the target tissue. Retroviral vectors are comprised of cis-acting long terminal repeats with packaging capacity for up to 6-10 kb of foreign sequence. The minimum cis-acting LTRs are sufficient for replication and packaging of the vectors, which are then used to integrate the therapeutic gene into the target cell to provide permanent transgene expression. Widely used retroviral vectors include those based upon murine leukemia virus (MuLV), gibbon ape leukemia virus (GaLV), Simian Immuno deficiency virus (SIV), human immunodeficiency virus (HIV), and combinations thereof (see, e.g., Buchscher et al., J. Virol. 66:2731-2739 (1992); Johann et al., J. Virol. 66:1635-1640 (1992); Sommnerfelt et al., Virol. 176:58-59 (1990); Wilson et al., J. Virol. 63:2374-2378 (1989); Miller et al., J. Virol. 65:2220-2224 (1991); PCT/US94/05700).

[0279] In applications where transient expression is preferred, adenoviral based systems may be used. Adenoviral based vectors are capable of very high transduction efficiency in many cell types and do not require cell division. With such vectors, high titer and levels of expression have been obtained. This vector can be produced in large quantities in a relatively simple system. Adeno-associated virus (“AAV”) vectors may also be used to transduce cells with target nucleic acids, e.g., in the in vitro production of nucleic acids and peptides, and for in vivo and ex vivo gene therapy procedures (see, e.g., West et al., Virology 160:38-47 (1987); U.S. Pat. No. 4,797,368; WO 93/24641; Kotin, Human Gene Therapy 5:793-801 (1994); Muzyczka, J. Clin. Invest. 94:1351 (1994). Construction of recombinant AAV vectors are described in a number of publications, including U.S. Pat. No. 5,173,414; Tratschin et al., Mol. Cell. Biol. 5:3251-3260 (1985); Tratschin, et al., Mol. Cell. Biol. 4:2072-2081 (1984); Hermonat & Muzyczka, PNAS 81:6466-6470 (1984); and Samulski et al., J. Virol. 63:03822-3828 (1989).

[0280] Packaging cells are typically used to form virus particles that are capable of infecting a host cell. Such cells include 293 cells, which package adenovirus, and ψ2 cells or PA317 cells, which package retrovirus. Viral vectors used in gene therapy are usually generated by producer a cell line that packages a nucleic acid vector into a viral particle. The vectors typically contain the minimal viral sequences required for packaging and subsequent integration into a host, other viral sequences being replaced by an expression cassette for the polynucleotide(s) to be expressed. The missing viral functions are typically supplied in trans by the packaging cell line. For example, AAV vectors used in gene therapy typically only possess ITR sequences from the AAV genome which arc required for packaging and integration into the host genome. Viral DNA is packaged in a cell line, which contains a helper plasmid encoding the other AAV genes, namely rep and cap, but lacking ITR sequences. The cell line may also infected with adenovirus as a helper. The helper virus promotes replication of the AAV vector and expression of AAV genes from the helper plasmid. The helper plasmid is not packaged in significant amounts due to a lack of ITR sequences. Contamination with adenovirus can be reduced by, e.g., heat treatment to which adenovirus is more sensitive than AAV. Additional methods for the delivery of nucleic acids to cells are known to those skilled in the art. See, for example, US20030087817, incorporated herein by reference.

[0281] In some embodiments, a host cell is transiently or non-transiently transfected with one or more vectors described herein. In some embodiments, a cell is transfected as it naturally occurs in a subject. In some embodiments, a cell that is transfected is taken from a subject. In some embodiments, the cell is derived from cells taken from a subject, such as a cell line. A wide variety of cell lines for tissue culture are known in the art. Examples of cell lines include, but are not limited to, C8161, CCRF-CEM, MOLT, mIMCD-3, NHDF, HeLa-S3, Huh1, Huh4, Huh7, HUVEC, HASMC, HEKn, HEKa, MiaPaCell, Panel, PC-3, TF1, CTLL-2, C1R, Rat6, CV1, RPTE, A10, T24, J82, A375, ARH-77, Calu1, SW480, SW620, SKOV3, SK-UT, CaCo2, P388D1, SEM-K2, WEHI-231, HB56, TIB55, Jurkat, J45.01. LRMB, Bel-1, BC-3, IC21, DLD2, Raw264.7, NRK, NRK-52E, MRC5, MEF, Hep G2, HeLa B, HeLa T4, COS, COS-1, COS-6, COS-M6A, BS-C-1 monkey kidney epithelial, BALB/3T3 mouse embryo fibroblast, 3T3 Swiss, 3T3-L1, 132-d5 human fetal fibroblasts; 10.1 mouse fibroblasts, 293-T, 3T3, 721, 9L, A2780, A2780ADR, A2780cis, A172, A20, A253, A431, A-549, ALC, B16, B35, BCP-1 cells, BEAS-2B, bEnd.3, BHK-21, BR293, BxPC3, C3H-10T1/2, C6/36, Cal-27, CHO, CH0-7, CHO-IR, CHO-K1, CHO-K2, CHO-T, CHO Dhfr −/−, COR-L23, COR-L23/CPR, COR-L23/5010, COR-L23/R23, COS-7, COV-434, CML TI, CMT, CT26, D17, DH82, DU145, DuCaP, EL4, EM2, EM3, EMT6/AR1, EMT6/AR10.0, FM3, H1299, H69, HB54, HB55, HCA2, HEK-293, HeLa, Hepalclc7, HL-60, HMEC, HT-29, Jurkat, JY cells, K562 cells, Ku812, KCL22, KGI, KYO1, LNCap, Ma-Mel1-48, MC-38, MCF-7, MCF-10A, MDA-MB-231, MDA-MB-468, MDA-MB-435, MDCK II, MDCK II, MOR/0.2R, MONO-MAC 6, MTD-1A, MyEnd, NCI-H69/CPR, NCI-H69/LX10, NCI-H69/LX20, NCI-H69/LX4, NIH-3T3, NALM-1, NW-145. OPCN 1OPCT cell lines, Peer, PNT-1A/PNT 2, RenCa, RIN-5F, RMA/RMAS, Saos-2 cells, Sf-9, SkBr3, T2, T-47D, T84, THP1 cell line, U373, U87, U937, VCaP, Vero cells, WM39, WT-49, X63, YAC-1, YAR, and transgenic varieties thereof. Cell lines are available from a variety of sources known to those with skill in the art (see, e.g., the American Type Culture Collection (ATCC) (Manassas, Va.)). In some embodiments, a cell transfected with one or more vectors described herein is used to establish a new cell line comprising one or more vector-derived sequences. In some embodiments, a cell transiently transfected with the components of a CRISPR system as described herein (such as by transient transfection of one or more vectors, or transfection with RNA), and modified through the activity of a CRISPR complex, is used to establish a new cell line comprising cells containing the modification but lacking any other exogenous sequence. In some embodiments, cells transiently or non-transiently transfected with one or more vectors described herein, or cell lines derived from such cells are used in assessing one or more test compounds.

[0282] In some embodiments, one or more vectors described herein are used to produce a non-human transgenic animal or transgenic plant. In some embodiments, the transgenic animal is a mammal, such as a mouse, rat, or rabbit. Methods for producing transgenic plants and animals are known in the art, and generally begin with a method of cell transfection, such as described herein.

[0283] In one aspect, the invention provides for methods of modifying a target polynucleotide in a eukaryotic cell. In some embodiments, the method comprises allowing a CRISPR complex to bind to the target polynucleotide to effect cleavage of said target polynucleotide thereby modifying the target polynucleotide, wherein the CRISPR complex comprises a CRISPR enzyme complexed with a guide sequence hybridized to a target sequence within said target polynucleotide, wherein said guide sequence is linked to a tractr mate sequence which in turn hybridizes to a tracr sequence.

[0284] In one aspect, the invention provides a method of modifying expression of a polynucleotide in a eukaryotic cell. In some embodiments, the method comprises allowing a CRISPR complex to bind to the polynucleotide such that said binding results in increased or decreased expression of said polynucleotide; wherein the CRISPR complex comprises a CRISPR enzyme complexed with a guide sequence hybridized to a target sequence within said polynucleotide, wherein said guide sequence is linked to a tracr mate sequence which in turn hybridizes to a tracr sequence.

[0285] In one aspect, the invention provides a computer system for selecting one or more candidate target sequences within a nucleic acid sequence in a eukaryotic cell for targeting by a CRISPR complex. In some embodiments, the system comprises (a) a memory unit configured to receive and/or store said nucleic acid sequence; and (b) one or more processors alone or in combination programmed to (i) locate a CRISPR motif sequence within said nucleic acid sequence, and (ii) select a sequence adjacent to said located CRISPR motif sequence as the candidate target sequence to which the CRISPR complex binds.

[0286] In one aspect, the invention provides a computer readable medium comprising codes that, upon execution by one or more processors, implements a method of selecting a candidate target sequence within a nucleic acid sequence in a eukaryotic cell for targeting by a CRISPR complex. In some embodiments, the method comprises (a) locating a CRISPR motif sequence within said nucleic acid sequence, and (b) selecting a sequence adjacent to said located CRISPR motif sequence as the candidate target sequence to which the CRISPR complex binds.

[0287] A computer system (or digital device) may be used to receive and store results, analyze the results, and/or produce a report of the results and analysis. A computer system may be understood as a logical apparatus that can read instructions from media (e.g. software) and/or network port (e.g. from the internet), which can optionally be connected to a server having fixed media. A computer system may comprise one or more of a CPU, disk drives, input devices such as keyboard and/or mouse, and a display (e.g. a monitor). Data communication, such as transmission of instructions or reports, can be achieved through a communication medium to a server at a local or a remote location. The communication medium can include any means of transmitting and/or receiving data. For example, the communication medium can be a network connection, a wireless connection, or an internet connection. Such a connection can provide for communication over the World Wide Web. It is envisioned that data relating to the present invention can be transmitted over such networks or connections (or any other suitable means for transmitting information, including but not limited to mailing a physical report, such as a print-out) for reception and/or for review by a receiver. The receiver can be but is not limited to an individual, or electronic system (e.g. one or more computers, and/or one or more servers).

[0288] In some embodiments, the computer system comprises one or more processors. Processors may be associated with one or more controllers, calculation units, and/or other units of a computer system, or implanted in firmware as desired. If implemented in software, the routines may be stored in any computer readable memory such as in RAM, ROM, flash memory, a magnetic disk, a laser disk, or other suitable storage medium. Likewise, this software may be delivered to a computing device via any known delivery method including, for example, over a communication channel such as a telephone line, the internet, a wireless connection, etc., or via a transportable medium, such as a computer readable disk, flash drive, etc. The various steps may be implemented as various blocks, operations, tools, modules and techniques which, in turn, may be implemented in hardware, firmware, software, or any combination of hardware, firmware, and/or software. When implemented in hardware, some or all of the blocks, operations, techniques, etc, may be implemented in, for example, a custom integrated circuit (IC), an application specific integrated circuit (ASIC), a field programmable logic array (FPGA), a programmable logic array (PLA), etc.

[0289] A client-server, relational database architecture can be used in embodiments of the invention. A client-server architecture is a network architecture in which each computer or process on the network is either a client or a server. Server computers are typically powerful computers dedicated to managing disk drives (file servers), printers (print servers), or network traffic (network servers). Client computers include PCs (personal computers) or workstations on which users run applications, as well as example output devices as disclosed herein. Client computers rely on server computers for resources, such as files, devices, and even processing power. In some embodiments of the invention, the server computer handles all of the database functionality. The client computer can have software that handles all the front-end data management and can also receive data input from users.

[0290] A machine readable medium comprising computer-executable code may take many forms, including but not limited to, a tangible storage medium, a carrier wave medium or physical transmission medium. Non-volatile storage media include, for example, optical or magnetic disks, such as any of the storage devices in any computer(s) or the like, such as may be used to implement the databases, etc, shown in the drawings. Volatile storage media include dynamic memory, such as main memory of such a computer platform. Tangible transmission media include coaxial cables; copper wire and fiber optics, including the wires that comprise a bus within a computer system. Carrier-wave transmission media may take the form of electric or electromagnetic signals, or acoustic or light waves such as those generated during radio frequency (RF) and infrared (IR) data communications. Common forms of computer-readable media therefore include for example: a floppy disk, a flexible disk, hard disk, magnetic tape, any other magnetic medium, a CD-ROM, DVD or DVD-ROM, any other optical medium, punch cards paper tape, any other physical storage medium with patterns of holes, a RAM, a ROM, a PROM and EPROM, a FLASH-EPROM, any other memory chip or cartridge, a carrier wave transporting data or instructions, cables or links transporting such a carrier wave, or any other medium from which a computer may read programming code and/or data. Many of these forms of computer readable media may be involved in carrying one or more sequences of one or more instructions to a processor for execution.

[0291] The subject computer-executable code can be executed on any suitable device comprising a processor, including a server, a PC, or a mobile device such as a smartphone or tablet. Any controller or computer optionally includes a monitor, which can be a cathode ray tube (“CRT”) display, a flat panel display (e.g., active matrix liquid crystal display, liquid crystal display, etc.), or others. Computer circuitry is often placed in a box, which includes numerous integrated circuit chips, such as a microprocessor, memory, interface circuits, and others. The box also optionally includes a hard disk drive, a floppy disk drive, a high capacity removable drive such as a writeable CD-ROM, and other common peripheral elements. Inputting devices such as a keyboard, mouse, or touch-sensitive screen, optionally provide for input from a user. The computer can include appropriate software for receiving user instructions, either in the form of user input into a set of parameter fields, e.g., in a GUI, or in the form of preprogrammed instructions, e.g., preprogrammed for a variety of different specific operations.

[0292] In one aspect, the invention provides kits containing any one or more of the elements disclosed in the above methods and compositions. In some embodiments, the kit comprises a vector system and instructions for using the kit. In some embodiments, the vector system comprises (a) a first regulatory element operably linked to a tracr mate sequence and one or more insertion sites for inserting a guide sequence upstream of the tracr mate sequence, wherein when expressed, the guide sequence directs sequence-specific binding of a CRISPR complex to a target sequence in a eukaryotic cell, wherein the CRISPR complex comprises a CRISPR enzyme complexed with (1) the guide sequence that is hybridized to the target sequence, and (2) the tracr mate sequence that is hybridized to the tracr sequence; and/or (b) a second regulatory element operably linked to an enzyme-coding sequence encoding said CRISPR enzyme comprising a nuclear localization sequence. Elements may provide individually or in combinations, and may provided in any suitable container, such as a vial, a bottle, or a tube. In some embodiments, the kit includes instructions in one or more languages, for example in more than one language.

[0293] In some embodiments, a kit comprises one or more reagents for use in a process utilizing one or more of the elements described herein. Reagents may be provided in any suitable container. For example, a kit may provide one or more reaction or storage buffers. Reagents may be provided in a form that is usable in a particular assay, or in a form that requires addition of one or more other components before use (e.g. in concentrate or lyophilized form). A buffer can be any buffer, including but not limited to a sodium carbonate buffer, a sodium bicarbonate buffer, a borate buffer, a Tris buffer, a MOPS buffer, a HEPES buffer, and combinations thereof. In some embodiments, the buffer is alkaline. In some embodiments, the buffer has a pH from about 7 to about 10. In some embodiments, the kit comprises one or more oligonucleotides corresponding to a guide sequence for insertion into a vector so as to operably link the guide sequence and a regulatory element. In some embodiments, the kit comprises a homologous recombination template polynucleotide.

[0294] In one aspect, the invention provides methods for using one or more elements of a CRISPR system. The CRISPR complex of the invention provides an effective means for modifying a target polynucleotide. The CRISPR complex of the invention has a wide variety of utility including modifying (e.g., deleting, inserting, translocating, inactivating, activating) a target polynucleotide in a multiplicity of cell types. As such the CRISPR complex of the invention has a broad spectrum of applications in, e.g., gene therapy, drug screening, disease diagnosis, and prognosis. An exemplary CRISPR complex comprises a CRISPR enzyme complexed with a guide sequence hybridized to a target sequence within the target polynucleotide. The guide sequence is linked to a tracr mate sequence, which in turn hybridizes to a tracr sequence.

[0295] In one embodiment, this invention provides a method of cleaving a target polynucleotide. The method comprises modifying a target polynucleotide using a CRISPR complex that binds to the target polynucleotide and effect cleavage of said target polynucleotide. Typically, the CRISPR complex of the invention, when introduced into a cell, creates a break (e.g., a single or a double strand break) in the genome sequence. For example, the method can be used to cleave a disease gene in a cell.

[0296] The break created by the CRISPR complex can be repaired by a repair process such as a homology-directed repair process. During the repair process, an exogenous polynucleotide template can be introduced into the genome sequence. In some methods, a homology-directed repair process is used modify genome sequence. For example, an exogenous polynucleotide template comprising a sequence to be integrated flanked by an upstream sequence and a downstream sequence is introduced into a cell. The upstream and downstream sequences share sequence similarity with either side of the site of integration in the chromosome.

[0297] Where desired, a donor polynucleotide can be DNA, e.g., a DNA plasmid, a bacterial artificial chromosome (BAC), a yeast artificial chromosome (YAC), a viral vector, a linear piece of DNA, a PCR fragment, a naked nucleic acid, or a nucleic acid complexed with a delivery vehicle such as a liposome or poloxamer.

[0298] The exogenous polynucleotide template comprises a sequence to be integrated (e.g. a mutated gene). The sequence for integration may be a sequence endogenous or exogenous to the cell. Examples of a sequence to be integrated include polynucleotides encoding a protein or a non-coding RNA (e.g., a microRNA). Thus, the sequence for integration may be operably linked to an appropriate control sequence or sequences. Alternatively, the sequence to be integrated may provide a regulatory function.

[0299] The upstream and downstream sequences in the exogenous polynucleotide template are selected to promote recombination between the chromosomal sequence of interest and the donor polynucleotide. The upstream sequence is a nucleic acid sequence that shares sequence similarity with the genome sequence upstream of the targeted site for integration. Similarly, the downstream sequence is a nucleic acid sequence that shares sequence similarity with the chromosomal sequence downstream of the targeted site of integration. The upstream and downstream sequences in the exogenous polynucleotide template can have 75%, 80%, 85%, 90%, 95%, or 100% sequence identity with the targeted genome sequence. Preferably, the upstream and downstream sequences in the exogenous polynucleotide template have about 95%, 96%, 97%, 98%, 99%, or 100% sequence identity with the targeted genome sequence. In some methods, the upstream and downstream sequences in the exogenous polynucleotide template have about 99% or 100% sequence identity with the targeted genome sequence.

[0300] An upstream or downstream sequence may comprise from about 20 bp to about 2500 bp, for example, about 50, 100, 200, 300, 400, 500, 600, 700, 800, 900, 1000, 1100, 1200, 1300, 1400, 1500, 1600, 1700, 1800, 1900, 2000, 2100, 2200, 2300, 2400, or 2500 bp. In some methods, the exemplary upstream or downstream sequence have about 200 bp to about 2000 bp, about 600 bp to about 1000 bp, or more particularly about 700 bp to about 1000 bp.

[0301] In some methods, the exogenous polynucleotide template may further comprise a marker. Such a marker may make it easy to screen for targeted integrations. Examples of suitable markers include restriction sites, fluorescent proteins, or selectable markers. The exogenous polynucleotide template of the invention can be constructed using recombinant techniques (see, for example, Sambrook et al., 2001 and Ausubel et al., 1996).

[0302] In an exemplary method for modifying a target polynucleotide by integrating an exogenous polynucleotide template, a double stranded break is introduced into the genome sequence by the CRISPR complex, the break is repaired via homologous recombination an exogenous polynucleotide template such that the template is integrated into the genome. The presence of a double-stranded break facilitates integration of the template.

[0303] In other embodiments, this invention provides a method of modifying expression of a polynucleotide in a eukaryotic cell. The method comprises increasing or decreasing expression of a target polynucleotide by using a CRISPR complex that binds to the polynucleotide.

[0304] Where desired, to effect the modification of the expression in a cell, one or more vectors comprising a tracr sequence, a guide sequence linked to the tracr mate sequence, a sequence encoding a CRISPR enzyme is delivered to a cell. In some methods, the one or more vectors comprises a regulatory element operably linked to an enzyme-coding sequence encoding said CRISPR enzyme comprising a nuclear localization sequence; and a regulatory element operably linked to a tracr mate sequence and one or more insertion sites for inserting a guide sequence upstream of the tracr mate sequence. When expressed, the guide sequence directs sequence-specific binding of a CRISPR complex to a target sequence in a cell. Typically, the CRISPR complex comprises a CRISPR enzyme complexed with (1) the guide sequence that is hybridized to the target sequence, and (2) the tracr mate sequence that is hybridized to the tracr sequence.

[0305] In some methods, a target polynucleotide can be inactivated to effect the modification of the expression in a cell. For example, upon the binding of a CRISPR complex to a target sequence in a cell, the target polynucleotide is inactivated such that the sequence is not transcribed, the coded protein is not produced, or the sequence does not function as the wild-type sequence does. For example, a protein or microRNA coding sequence may be inactivated such that the protein is not produced.

[0306] In some methods, a control sequence can be inactivated such that it no longer functions as a control sequence. As used herein, “control sequence” refers to any nucleic acid sequence that effects the transcription, translation, or accessibility of a nucleic acid sequence. Examples of a control sequence include, a promoter, a transcription terminator, and an enhancer are control sequences.

[0307] The inactivated target sequence may include a deletion mutation (i.e., deletion of one or more nucleotides), an insertion mutation (i.e., insertion of one or more nucleotides), or a nonsense mutation (i.e., substitution of a single nucleotide for another nucleotide such that a stop codon is introduced). In some methods, the inactivation of a target sequence results in “knock-out” of the target sequence.

[0308] A method of the invention may be used to create an animal or cell that may be used as a disease model. As used herein, “disease” refers to a disease, disorder, or indication in a subject. For example, a method of the invention may be used to create an animal or cell that comprises a modification in one or more nucleic acid sequences associated with a disease, or an animal or cell in which the expression of one or more nucleic acid sequences associated with a disease are altered. Such a nucleic acid sequence may encode a disease associated protein sequence or may be a disease associated control sequence.

[0309] In some methods, the disease model can be used to study the effects of mutations on the animal or cell and development and/or progression of the disease using measures commonly used in the study of the disease. Alternatively, such a disease model is useful for studying the effect of a pharmaceutically active compound on the disease.

[0310] In some methods, the disease model can be used to assess the efficacy of a potential gene therapy strategy. That is, a disease-associated gene or polynucleotide can be modified such that the disease development and/or progression is inhibited or reduced. In particular, the method comprises modifying a disease-associated gene or polynucleotide such that an altered protein is produced and, as a result, the animal or cell has an altered response. Accordingly, in some methods, a genetically modified animal may be compared with an animal predisposed to development of the disease such that the effect of the gene therapy event may be assessed.

[0311] In another embodiment, this invention provides a method of developing a biologically active agent that modulates a cell signaling event associated with a disease gene. The method comprises contacting a test compound with a cell comprising one or more vectors that drive expression of one or more of a CRISPR enzyme, a guide sequence linked to a tracr mate sequence, and a tracr sequence; and detecting a change in a readout that is indicative of a reduction or an augmentation of a cell signaling event associated with, e.g., a mutation in a disease gene contained in the cell.

[0312] A cell model or animal model can be constructed in combination with the method of the invention for screening a cellular function change. Such a model may be used to study the effects of a genome sequence modified by the CRISPR complex of the invention on a cellular function of interest. For example, a cellular function model may be used to study the effect of a modified genome sequence on intracellular signaling or extracellular signaling. Alternatively, a cellular function model may be used to study the effects of a modified genome sequence on sensory perception. In some such models, one or more genome sequences associated with a signaling biochemical pathway in the model are modified.

[0313] An altered expression of one or more genome sequences associated with a signaling biochemical pathway can be determined by assaying for a difference in the mRNA levels of the corresponding genes between the test model cell and a control cell, when they are contacted with a candidate agent. Alternatively, the differential expression of the sequences associated with a signaling biochemical pathway is determined by detecting a difference in the level of the encoded polypeptide or gene product.

[0314] To assay for an agent-induced alteration in the level of mRNA transcripts or corresponding polynucleotides, nucleic acid contained in a sample is first extracted according to standard methods in the art. For instance, mRNA can be isolated using various lytic enzymes or chemical solutions according to the procedures set forth in Sambrook et al. (1989), or extracted by nucleic-acid-binding resins following the accompanying instructions provided by the manufacturers. The mRNA contained in the extracted nucleic acid sample is then detected by amplification procedures or conventional hybridization assays (e.g. Northern blot analysis) according to methods widely known in the art or based on the methods exemplified herein.

[0315] For purpose of this invention, amplification means any method employing a primer and a polymerase capable of replicating a target sequence with reasonable fidelity. Amplification may be carried out by natural or recombinant DNA polymerases such as TaqGold™, T7 DNA polymerase, Klenow fragment of E. coli DNA polymerase, and reverse transcriptase. A preferred amplification method is PCR. In particular, the isolated RNA can be subjected to a reverse transcription assay that is coupled with a quantitative polymerase chain reaction (RT-PCR) in order to quantify the expression level of a sequence associated with a signaling biochemical pathway.

[0316] Detection of the gene expression level can be conducted in real time in an amplification assay. In one aspect, the amplified products can be directly visualized with fluorescent DNA-binding agents including but not limited to DNA intercalators and DNA groove binders. Because the amount of the intercalators incorporated into the double-stranded DNA molecules is typically propmiional to the amount of the amplified DNA products, one can conveniently determine the amount of the amplified products by quantifying the fluorescence of the intercalated dye using conventional optical systems in the art. DNA-binding dye suitable for this application include SYBR green, SYBR blue, DAPI, propidium iodine. Hoeste, SYBR gold, ethidium bromide, acridines, proflavine, acridine orange, acriflavine, fluorcoumanin, ellipticine, daunomycin, chloroquine, distamycin D, chromomycin, homidium, mithramycin, ruthenium polypyridyls, anthramycin, and the like.

[0317] In another aspect, other fluorescent labels such as sequence specific probes can be employed in the amplification reaction to facilitate the detection and quantification of the amplified products. Probe-based quantitative amplification relies on the sequence-specific detection of a desired amplified product. It utilizes fluorescent, target-specific probe (e.g., TaqMan® probes) resulting in increased specificity and sensitivity. Methods for performing probe-based quantitative amplification are well established in the art and are taught in U.S. Pat. No. 5,210,015.

[0318] In yet another aspect, conventional hybridization assays using hybridization probes that share sequence homology with sequences associated with a signaling biochemical pathway can be performed. Typically, probes are allowed to form stable complexes with the sequences associated with a signaling biochemical pathway contained within the biological sample derived from the test subject in a hybridization reaction. It will be appreciated by one of skill in the art that where antisense is used as the probe nucleic acid, the target polynucleotides provided in the sample are chosen to be complementary to sequences of the antisense nucleic acids. Conversely, where the nucleotide probe is a sense nucleic acid, the target polynucleotide is selected to be complementary to sequences of the sense nucleic acid.

[0319] Hybridization can be performed under conditions of various stringency. Suitable hybridization conditions for the practice of the present invention are such that the recognition interaction between the probe and sequences associated with a signaling biochemical pathway is both sufficiently specific and sufficiently stable. Conditions that increase the stringency of a hybridization reaction are widely known and published in the art. See, for example, (Sambrook, et al., (1989); Nonradioactive In Situ Hybridization Application Manual, Boehringer Mannheim, second edition). The hybridization assay can be formed using probes immobilized on any solid support, including but are not limited to nitrocellulose, glass, silicon, and a variety of gene arrays. A preferred hybridization assay is conducted on high-density gene chips as described in U.S. Pat. No. 5,445,934.

[0320] For a convenient detection of the probe-target complexes formed during the hybridization assay, the nucleotide probes are conjugated to a detectable label. Detectable labels suitable for use in the present invention include any composition detectable by photochemical, biochemical, spectroscopic, immunochemical, electrical, optical or chemical means. A wide variety of appropriate detectable labels are known in the art, which include fluorescent or chemiluminescent labels, radioactive isotope labels, enzymatic or other ligands. In preferred embodiments, one will likely desire to employ a fluorescent label or an enzyme tag, such as digoxigenin, β-galactosidase, urease, alkaline phosphatase or peroxidase, avidin/biotin complex.

[0321] The detection methods used to detect or quantify the hybridization intensity will typically depend upon the label selected above. For example, radiolabels may be detected using photographic film or a phosphoimager. Fluorescent markers may be detected and quantified using a photodetector to detect emitted light. Enzymatic labels are typically detected by providing the enzyme with a substrate and measuring the reaction product produced by the action of the enzyme on the substrate; and finally colorimetric labels are detected by simply visualizing the colored label.

[0322] An agent-induced change in expression of sequences associated with a signaling biochemical pathway can also be determined by examining the corresponding gene products. Determining the protein level typically involves a) contacting the protein contained in a biological sample with an agent that specifically bind to a protein associated with a signaling biochemical pathway; and (b) identifying any agent:protein complex so formed. In one aspect of this embodiment, the agent that specifically binds a protein associated with a signaling biochemical pathway is an antibody, preferably a monoclonal antibody.

[0323] The reaction is performed by contacting the agent with a sample of the proteins associated with a signaling biochemical pathway derived from the test samples under conditions that will allow a complex to form between the agent and the proteins associated with a signaling biochemical pathway. The formation of the complex can be detected directly or indirectly according to standard procedures in the art. In the direct detection method, the agents are supplied with a detectable label and unreacted agents may be removed from the complex; the amount of remaining label thereby indicating the amount of complex formed. For such method, it is preferable to select labels that remain attached to the agents even during stringent washing conditions. It is preferable that the label does not interfere with the binding reaction. In the alternative, an indirect detection procedure requires the agent to contain a label introduced either chemically or enzymatically. A desirable label generally does not interfere with binding or the stability of the resulting agent:polypeptide complex. However, the label is typically designed to be accessible to an antibody for an effective binding and hence generating a detectable signal.

[0324] A wide variety of labels suitable for detecting protein levels are known in the art. Non-limiting examples include radioisotopes, enzymes, colloidal metals, fluorescent compounds, bioluminescent compounds, and chemiluminescent compounds.

[0325] The amount of agent:polypeptide complexes formed during the binding reaction can be quantified by standard quantitative assays. As illustrated above, the formation of agent:polypeptide complex can be measured directly by the amount of label remained at the site of binding. In an alternative, the protein associated with a signaling biochemical pathway is tested for its ability to compete with a labeled analog for binding sites on the specific agent. In this competitive assay, the amount of label captured is inversely proportional to the amount of protein sequences associated with a signaling biochemical pathway present in a test sample.

[0326] A number of techniques for protein analysis based on the general principles outlined above are available in the art. They include but are not limited to radioimmunoassays, ELISA (enzyme linked immunoradiometric assays), “sandwich” immunoassays, immunoradiometric assays, in situ immunoassays (using e.g., colloidal gold, enzyme or radioisotope labels), western blot analysis, immunoprecipitation assays, immunofluorescent assays, and SDS-PAGE.

[0327] Antibodies that specifically recognize or bind to proteins associated with a signaling biochemical pathway are preferable for conducting the aforementioned protein analyses. Where desired, antibodies that recognize a specific type of post-translational modifications (e.g., signaling biochemical pathway inducible modifications) can be used. Post-translational modifications include but are not limited to glycosylation, lipidation, acetylation, and phosphorylation. These antibodies may be purchased from commercial vendors. For example, anti-phosphotyrosine antibodies that specifically recognize tyrosine-phosphorylated proteins are available from a number of vendors including Invitrogen and Perkin Elmer. Anti-phosphotyrosine antibodies are particularly useful in detecting proteins that are differentially phosphorylated on their tyrosine residues in response to an ER stress. Such proteins include but are not limited to eukaryotic translation initiation factor 2 alpha (eIF-2α). Alternatively, these antibodies can be generated using conventional polyclonal or monoclonal antibody technologies by immunizing a host animal or an antibody-producing cell with a target protein that exhibits the desired post-translational modification.

[0328] In practicing the subject method, it may be desirable to discern the expression pattern of an protein associated with a signaling biochemical pathway in different bodily tissue, in different cell types, and/or in different subcellular structures. These studies can be performed with the use of tissue-specific, cell-specific or subcellular structure specific antibodies capable of binding to protein markers that are preferentially expressed in certain tissues, cell types, or subcellular structures.

[0329] An altered expression of a gene associated with a signaling biochemical pathway can also be determined by examining a change in activity of the gene product relative to a control cell. The assay for an agent-induced change in the activity of a protein associated with a signaling biochemical pathway will dependent on the biological activity and/or the signal transduction pathway that is under investigation. For example, where the protein is a kinase, a change in its ability to phosphorylate the downstream substrate(s) can be determined by a variety of assays known in the art. Representative assays include but are not limited to immunoblotting and immunoprecipitation with antibodies such as anti-phosphotyrosine antibodies that recognize phosphorylated proteins. In addition, kinase activity can be detected by high throughput chemiluminescent assays such as AlphaScreen™ (available from Perkin Elmer) and eTag™ assay (Chan-Hui, et al. (2003) Clinical Immunology III: 162-174).

[0330] Where the protein associated with a signaling biochemical pathway is part of a signaling cascade leading to a fluctuation of intracellular pH condition, pH sensitive molecules such as fluorescent pH dyes can be used as the reporter molecules. In another example where the protein associated with a signaling biochemical pathway is an ion channel, fluctuations in membrane potential and/or intracellular ion concentration can be monitored. A number of commercial kits and high-throughput devices are particularly suited for a rapid and robust screening for modulators of ion channels. Representative instruments include FLIPR™ (Molecular Devices, Inc.) and VIPR (Aurora Biosciences). These instruments are capable of detecting reactions in over 1000 sample wells of a microplate simultaneously, and providing real-time measurement and functional data within a second or even a minisecond.

[0331] In practicing any of the methods disclosed herein, a suitable vector can be introduced to a cell or an embryo via one or more methods known in the art, including without limitation, microinjection, electroporation, sonoporation, biolistics, calcium phosphate-mediated transfection, cationic transfection, liposome transfection, dendrimer transfection, heat shock transfection, nucleofection transfection, magnetofection, lipofection, impalefection, optical transfection, proprietary agent-enhanced uptake of nucleic acids, and delivery via liposomes, immunoliposomes, virosomes, or artificial virions. In some methods, the vector is introduced into an embryo by microinjection. The vector or vectors may be microinjected into the nucleus or the cytoplasm of the embryo. In some methods, the vector or vectors may be introduced into a cell by nucleofection.

[0332] The target polynucleotide of a CRISPR complex can be any polynucleotide endogenous or exogenous to the eukaryotic cell. For example, the target polynucleotide can be a polynucleotide residing in the nucleus of the eukaryotic cell. The target polynucleotide can be a sequence coding a gene product (e.g., a protein) or a non-coding sequence (e.g., a regulatory polynucleotide or a junk DNA).

[0333] Examples of target polynucleotides include a sequence associated with a signaling biochemical pathway, e.g., a signaling biochemical pathway-associated gene or polynucleotide. Examples of target polynucleotides include a disease associated gene or polynucleotide. A “disease-associated” gene or polynucleotide refers to any gene or polynucleotide which is yielding transcription or translation products at an abnormal level or in an abnormal form in cells derived from a disease-affected tissues compared with tissues or cells of a non disease control. It may be a gene that becomes expressed at an abnormally high level; it may be a gene that becomes expressed at an abnormally low level, where the altered expression correlates with the occurrence and/or progression of the disease. A disease-associated gene also refers to a gene possessing mutation(s) or genetic variation that is directly responsible or is in linkage disequilibrium with a gene(s) that is responsible for the etiology of a disease. The transcribed or translated products may be known or unknown, and may be at a normal or abnormal level.

[0334] Examples of disease-associated genes and polynucleotides are listed in Tables A and B. In Table B, a six-digit number following an entry in the Disease/Disorder/Indication column is an OMIM number (Online Mendelian Inheritance in Man, OMIM™. McKusick-Nathans Institute of Genetic Medicine, Johns Hopkins University (Baltimore, Md.) and National Center for Biotechnology Information, National Library of Medicine (Bethesda, Md.), available on the World Wide Web. A number in parentheses after the name of each disorder indicates whether the mutation was positioned by mapping the wildtype gene (1), by mapping the disease phenotype itself (2), or by both approaches (3). For example, a “(3)”, includes mapping of the wildtype gene combined with demonstration of a mutation in that gene in association with the disorder.”

[0335] Examples of signaling biochemical pathway-associated genes and polynucleotides are listed in Table C.

TABLE A

| DISEASE/DISORDERS | GENE(S) |
|---|---|
| Neoplasia | PTEN; ATM; ATR; EGFR; ERBB2; ERBB3; ERBB4; |
| | Notch1; Notch2; Notch3; Notch4; AKT; AKT2; AKT3; HIF; |
| | HIF1a; HIF3a; Met; HRG; Bcl2; PPAR alpha; PPAR |
| | gamma; WT1 (Wilms Tumor); FGF Receptor Family |
| | members (5 members: 1, 2, 3, 4, 5); CDKN2a; APC; RB |
| | (retinoblastoma); MEN1; VHL; BRCA1; BRCA2; AR |
| | (Androgen Receptor); TSG101; IGF; IGF Receptor; Igf1 (4 |
| | variants); Igf2 (3 variants); Igf 1 Receptor; Igf 2 Receptor; |
| | Bax; Bcl2; caspases family (9 members: |
| | 1, 2, 3, 4, 6, 7, 8, 9, 12); Kras; Apc |
| Age-related Macular | Abcr; Ccl2; Cc2; cp (ceruloplasmin); Timp3; cathepsinD; |
| Degeneration | Vldlr; Ccr2 |
| Schizophrenia | Neuregulin1 (Nrg1); Erb4 (receptor for Neuregulin); |
| | Complexin1 (Cplx1); Tph1 Tryptophan hydroxylase; Tph2 |
| | Tryptophan hydroxylase 2; Neurexin 1; GSK3; GSK3a; |
| | GSK3b |
| Disorders | 5-HTT (Slc6a4); COMT; DRD (Drd1a); SLC6A3; DAOA; |
| | DTNBP1; Dao (Dao1) |
| Trinucleotide Repeat | HTT (Huntington's Dx); SBMA/SMAX1/AR (Kennedy's |
| Disorders | Dx); FXN/X25 (Friedrich's Ataxia); ATX3 (Machado- |
| | Joseph's Dx); ATXN1 and ATXN2 (spinocerebellar |
| | ataxias); DMPK (myotonic dystrophy); Atrophin-1 and Atn1 |
| | (DRPLA Dx); CBP (Creb-BP - global instability); VLDLR |
| | (Alzheimer's); Atxn7; Atxn10 |
| Fragile X Syndrome | FMR2; FXR1; FXR2; mGLUR5 |
| Secretase Related | APH-1 (alpha and beta); Presenilin (Psen1); nicastrin |
| Disorders | (Ncstn); PEN-2 |
| Others | Nos1; Parp1; Nat1; Nat2 |
| Prion - related disorders | Prp |
| ALS | SOD1; ALS2; STEX; FUS; TARDBP; VEGF (VEGF-a; |
| | VEGF-b; VEGF-c) |
| Drug addiction | Prkce (alcohol); Drd2; Drd4; ABAT (alcohol); GRIA2; |
| | Grm5; Grin1; Htr1b; Grin2a; Drd3; Pdyn; Gria1 (alcohol) |
| Autism | Mecp2; BZRAP1; MDGA2; Sema5A; Neurexin 1; Fragile X |
| | (FMR2 (AFF2); FXR1; FXR2; Mglur5) |
| Alzheimer's Disease | E1; CHIP; UCH; UBB; Tau; LRP; PICALM; Clusterin; PS1; |
| | SORL1; CR1; Vldlr; Uba1; Uba3; CHIP28 (Aqp1, |
| | Aquaporin 1); Uchl1; Uchl3; APP |
| Inflammation | IL-10; IL-1 (IL-1a; IL-1b); IL-13; IL-17 (IL-17a (CTLA8); IL- |
| | 17b; IL-17c; IL-17d; IL-17f); II-23; Cx3cr1; ptpn22; TNFa; |
| | NOD2/CARD15 for IBD; IL-6; IL-12 (IL-12a; IL-12b); |
| | CTLA4; Cx3cl1 |
| Parkinson's Disease | x-Synuclein; DJ-1; LRRK2; Parkin; PINK1 |

TABLE B

| DISEASE/DISORDER/INDICATION | GENE(S) |
|---|---|
| 17,20-lyase deficiency, isolated, 202110 (3) | CYP17A1, CYP17, P450C17 |
| 17-alpha-hydroxylase/17,20-lyase | CYP17A1, CYP17, P450C17 |
| deficiency, 202110 (3) | |
| 2-methyl-3-hydroxybutyryl-CoA | HADH2, ERAB |
| dehydrogenase deficiency, 300438 (3) | |
| 2-methylbutyrylglycinuria (3) | ACADSB |
| 3-beta-hydroxysteroid dehydrogenase, type | HSD3B2 |
| II, deficiency (3) | |
| 3-hydroxyacyl-CoA dehydrogenase | HADHSC, SCHAD |
| deficiency, 609609 (3) | |
| 3-Methylcrotonyl-CoA carboxylase 1 | MCCC1, MCCA |
| deficiency, 210200 (3) | |
| 3-Methylcrotonyl-CoA carboxylase 2 | MCCC2, MCCB |
| deficiency, 210210 (3) | |
| 3-methylglutaconic aciduria, type I, 250950 | AUH |
| (3) | |
| 3-methylglutaconicaciduria, type III, 258501 | OPA3, MGA3 |
| (3) | |
| 3-M syndrome, 273750 (3) | CUL7 |
| 6-mercaptopurine sensitivity (3) | TPMT |
| Aarskog-Scott syndrome (3) | FGD1, FGDY, AAS |
| Abacavir hypersensitivity, susceptibility to | HLA-B |
| (3) | |
| ABCD syndrome, 600501 (3) | EDNRB, HSCR2, ABCDS |
| Abetalipoproteinemia, 200100 (3) | MTP |
| Abetalipoproteinemia (3) | APOB, FLDB |
| Acampomelic campolelic dysplasia, 114290 | SOX9, CMD1, SRA1 |
| (3) | |
| Acatalasemia (3) | CAT |
| Accelerated tumor formation, susceptibility | MDM2 |
| to (3) | |
| Achalasia-addisonianism-alacrimia | AAAS, AAA |
| syndrome, 231550 (3) | |
| Acheiropody, 200500 (3) | C7orf2, ACHP, LMBR1 |
| Achondrogenesis-hypochondrogenesis, | COL2A1 |
| type II, 200610 (3) | |
| Achondrogenesis Ib, 600972 (3) | SLC26A2, DTD, DTDST, D5S1708, |
| | EDM4 |
| Achondroplasia, 100800 (3) | FGFR3, ACH |
| Achromatopsia-2, 216900 (3) | CNGA3, CNG3, ACHM2 |
| Achromatopsia-3, 262300 (3) | CNGB3, ACHM3 |
| Achromatopsia-4 (3) | GNAT2, ACHM4 |
| Acid-labile subunit, deficiency of (3) | IGFALS, ALS |
| Acquired long QT syndrome, susceptibility | KCNH2, LQT2, HERG |
| to (3) | |
| Acrocallosal syndrome, 200990 (3) | GLI3, PAPA, PAPB, ACLS |
| Acrocapitofemoral dysplasia, 607778 (3) | IHH, BDA1 |
| Acrodermatitis enteropathica, 201100 (3) | SLC39A4, ZIP4 |
| Acrokeratosis verruciformis, 101900 (3) | ATP2A2, ATP2B, DAR |
| Acromegaly, 102200 (3) | GNAS, GNAS1, GPSA, POH, PHP1B, |
| | PHP1A, AHO |
| Acromegaly, 102200 (3) | SSTR5 |
| Acromesomelic dysplasia, Hunter- | GDF5, CDMP1 |
| Thompson type, 201250 (3) | |
| Acromesomelic dysplasia, Maroteaux type, | NPR2, ANPRB, AMDM |
| 602875 (3) | |
| Acyl-CoA dehydrogenase, long chain, | ACADL, LCAD |
| deficiency of (3) | |
| Acyl-CoA dehydrogenase, medium chain, | ACADM, MCAD |
| deficiency of, 201450 (3) | |
| Acyl-CoA dehydrogenase, short-chain, | ACADS, SCAD |
| deficiency of, 201470 (3) | |
| Adenocarcinoma of lung, response to | EGFR |
| tyrosine kinase inhibitor in, 211980 (3) | |
| Adenocarcinoma of lung, somatic, 211980 | BRAF |
| (3) | |
| Adenocarcinoma of lung, somatic, 211980 | ERBB2, NGL, NEU, HER2 |
| (3) | |
| Adenocarcinoma of lung, somatic, 211980 | PRKN, PARK2, PDJ |
| (3) | |
| Adenocarcinoma, ovarian, somatic (3) | PRKN, PARK2, PDJ |
| Adenoma, periampullary (3) | APC, GS, FPC |
| Adenomas, multiple colorectal, 608456 (3) | MUTYH |
| Adenomas, salivary gland pleomorphic, | PLAG1, SGPA, PSA |
| 181030 (3) | |
| Adenomatous polyposis coli (3) | APC, GS, FPC |
| Adenomatous polyposis coli, attenuated (3) | APC, GS, FPC |
| Adenosine deaminase deficiency, partial, | ADA |
| 102700 (3) | |
| Adenylosuccinase deficiency, 103050 (3) | ADSL |
| Adiponectin deficiency (3) | APM1, GBP28 |
| Adrenal adenoma, sporadic (3) | MEN1 |
| Adrenal cortical carcinoma, 202300 (3) | TP53, P53, LFS1 |
| Adrenal hyperplasia, congenital, due to 11- | CYP11B1, P450C11, FHI |
| beta-hydroxylase deficiency (3) | |
| Adrenal hyperplasia, congenital, due to 21- | CYP21A2, CYP21, CA21H |
| hydroxylase deficiency (3) | |
| Adrenal hyperplasia, congenital, due to | POR |
| combined P450C17 and P450C21 | |
| deficiency, 201750 (3) | |
| Adrenal hypoplasia, congenital, with | DAX1, AHC, AHX, NROB1 |
| hypogonadotropic hypogonadism, 300200 | |
| (3) | |
| Adrenocortical insufficiency without ovarian | FTZF1, FTZ1, SF1 |
| defect (3) | |
| Adrenocortical tumor, somatic (3) | PRKAR1A, TSE1, CNC1, CAR |
| Adrenocorticotropic hormone deficiency, | TBS19 |
| 201400 (3) | |
| Adrenoleukodystrophy, 300100 (3) | ABCD1, ALD, AMN |
| Adrenoleukodystrophy, neonatal, 202370 | PEX10, NALD |
| (3) | |
| Adrenoleukodystrophy, neonatal, 202370 | PEX13, ZWS, NALD |
| (3) | |
| Adrenoleukodystrophy, neonatal, 202370 | PEX1, ZWS1 |
| (3) | |
| Adrenoleukodystrophy, neonatal, 202370 | PEX26 |
| (3) | |
| Adrenoleukodystrophy, neonatal, 202370 | PXR1, PEX5, PTS1R |
| (3) | |
| Adrenomyeloneuropathy, 300100 (3) | ABCD1, ALD, AMN |
| Adult i phenotype with congenital cataract, | GCNT2 |
| 110800 (3) | |
| Adult i phenotype without cataract, 110800 | GCNT2 |
| (3) | |
| ADULT syndrome, 103285 (3) | TP73L, TP63, KET, EEC3, SHFM4, |
| | LMS, RHS |
| Advanced sleep phase syndrome, familial, | PER2, FASPS, KIAA0347 |
| 604348 (3) | |
| Afibrinogenemia, 202400 (3) | FGA |
| Afibrinogenemia, congenital, 202400 (3) | FGB |
| Agammaglobulinemia, 601495 (3) | IGHM, MU |
| Agammaglobulinemia, autosomal recessive | IGLL1, IGO, IGL5, VPREB2 |
| (3) | |
| Agammaglobulinemia, non-Bruton type, | LRRC8, KIAA1437 |
| 601495 (3) | |
| Agammaglobulinemia, type 1, X-linked (3) | BTK, AGMX1, IMD1, XLA, AT |
| AGAT deficiency (3) | GATM, AGAT |
| Agenesis of the corpus callosum with | SLC12A6, KCC3A, KCC3B, KCC3, |
| peripheral neuropathy, 218000 (3) | ACCPN |
| AICA-ribosiduria due to ATIC deficiency, | ATIC, PURH, AICAR |
| 608688 (3) | |
| AIDS, delayed/rapid progression to (3) | KIR3DL1, NKAT3, NKB1, AMB11, |
| | KIR3DS1 |
| AIDS, rapid progression to, 609423 (3) | IFNG |
| AIDS, resistance to (3) | CXCL12, SDF1 |
| Alagille syndrome, 118450 (3) | JAG1, AGS, AHD |
| Albinism, brown oculocutaneous, (3) | OCA2, P, PED, D15S12, BOCA |
| Albinism, ocular, autosomal recessive (3) | OCA2, P, PED, D15S12, BOCA |
| Albinism, oculocutaneous, type IA, 203100 | TYR |
| (3) | |
| Albinism, oculocutaneous, type IB, 606952 | TYR |
| (3) | |
| Albinism, oculocutaneous, type II (3) | OCA2, P, PED, D15S12, BOCA |
| Albinism, rufous, 278400 (3) | TYRP1, CAS2, GP75 |
| Alcohol dependence, susceptibility to, | HTR2A |
| 103780 (3) | |
| Alcohol intolerance, acute (3) | ALDH2 |
| Alcoholism, susceptibility to, 103780 (3) | GABRA2 |
| Aldolase A deficiency (3) | ALDOA |
| Aldosterone to renin ratio raised (3) | CYP11B2 |
| Aldosteronism, glucocorticoid-remediable, | CYP11B1, P450C11, FHI |
| 103900 (3) | |
| Alexander disease, 203450 (3) | GFAP |
| Alexander disease, 203450 (3) | NDUFV1, UQOR1 |
| Alkaptonuria, 203500 (3) | HGD, AKU |
| Allan-Herndon-Dudley syndrome, 300523 | SLC16A2, DXS128, XPCT |
| (3) | |
| Allergic rhinitis, susceptibility to, 607154 (3) | IL13, ALRH |
| Alopecia universalis, 203655 (3) | HR, AU |
| Alpers syndrome, 203700 (3) | POLG, POLG1, POLGA, PEO |
| Alpha-1-antichymotrypsin deficiency (3) | SERPINA3, AACT, ACT |
| Alpha-actinin-3 deficiency (3) | ACTN3 |
| Alpha-methylacetoacetic aciduria, 203750 | ACAT1 |
| (3) | |
| Alpha-methylacyl-CoA racemase deficiency | AMACR |
| (3) | |
| Alpha-thalassemia/mental retardation | ATRX, XH2, XNP, MRXS3, SHS |
| syndrome, 301040 (3) | |
| Alpha-thalassemia myelodysplasia | ATRX, XH2, XNP, MRXS3, SHS |
| syndrome, somatic, 300448 (3) | |
| Alport syndrome, 301050 (3) | COL4A5, ATS, ASLN |
| Alport syndrome, autosomal recessive, | COL4A3 |
| 203780 (3) | |
| Alport syndrome, autosomal recessive, | COL4A4 |
| 203780 (3) | |
| Alstrom syndrome, 203800 (3) | ALMS1, ALSS, KIAA0328 |
| Alternating hemiplegia of childhood, 104290 | ATP1A2, FHM2, MHP2 |
| (3) | |
| Alveolar soft-part sarcoma, 606243 (3) | ASPCR1, RCC17, ASPL, ASPS |
| Alzheimer disease-1, APP-related (3) | APP, AAA, CVAP, AD1 |
| Alzheimer disease-2, 104310 (3) | APOE, AD2 |
| Alzheimer disease-4, 606889 (3) | PSEN2, AD4, STM2 |
| Alzheimer disease, late-onset, 104300 (3) | APBB2, FE65L1 |
| Alzheimer disease, late-onset, susceptibility | NOS3 |
| to, 104300 (3) | |
| Alzheimer disease, late-onset, susceptibility | PLAU, URK |
| to, 104300 (3) | |
| Alzheimer disease, susceptibility to, 104300 | ACE, DCP1, ACE1 |
| (3) | |
| Alzheimer disease, susceptibility to, 104300 | MPO |
| (3) | |
| Alzheimer disease, susceptibility to, 104300 | PACIP1, PAXIP1L, PTIP |
| (3) | |
| Alzheimer disease, susceptibility to (3) | A2M |
| Alzheimer disease, susceptibility to (3) | BLMH, BMH |
| Alzheimer disease, type 3, 607822 (3) | PSEN1, AD3 |
| Alzheimer disease, type 3, with spastic | PSEN1, AD3 |
| paraparesis and apraxia, 607822 (3) | |
| Alzheimer disease, type 3, with spastic | PSEN1, AD3 |
| paraparesis and unusual plaques, 607822 | |
| (3) | |
| Amelogenesis imperfecta 2, hypoplastic | ENAM |
| local, 104500 (3) | |
| Amelogenesis imperfecta, 301200 (3) | AMELX, AMG, AIH1, AMGX |
| Amelogenesis imperfecta, hypomaturation- | DLX3, TDO |
| hypoplastic type, with taurodontism, 104510 | |
| (3) | |
| Amelogenesis imperfecta, hypoplastic, and | ENAM |
| openbite malocclusion, 608563 (3) | |
| Amelogenesis imperfecta, pigmented | KLK4, EMSP1, PRSS17 |
| hypomaturation type, 204700 (3) | |
| Amish infantile epilepsy syndrome, 609056 | SIAT9, ST3GALV |
| (3) | |
| AMP deaminase deficiency, erythrocytic (3) | AMPD3 |
| Amyloid neuropathy, familial, several allelic | TTR, PALB |
| types (3) | |
| Amyloidosis, 3 or more types (3) | APOA1 |
| Amyloidosis, cerebroarterial, Dutch type (3) | APP, AAA, CVAP, AD1 |
| Amyloidosis, Finnish type, 105120 (3) | GSN |
| Amyloidosis, hereditary renal, 105200 (3) | FGA |
| Amyloidosis, renal, 105200 (3) | LYZ |
| Amyloidosis, senile systemic (3) | TTR, PALB |
| Amyotrophic lateral sclerosis 8, 608627 (3) | VAPB, VAPC, ALS8 |
| Amyotrophic lateral sclerosis, due to SOD1 | SOD1, ALS1 |
| deficiency, 105400 (3) | |
| Amyotrophic lateral sclerosis, juvenile, | ALS2, ALSJ, PLSJ, IAHSP |
| 205100 (3) | |
| Amyotrophic lateral sclerosis, susceptibility | DCTN1 |
| to, 105400 (3) | |
| Amyotrophic lateral sclerosis, susceptibility | NEFH |
| to, 105400 (3) | |
| Amyotrophic lateral sclerosis, susceptibility | PRPH |
| to, 105400 (3) | |
| Analbuminemia (3) | ALB |
| Analgesia from kappa-opioid receptor | MC1R |
| agonist, female-specific (3) | |
| Anderson disease, 607689 (3) | SARA2, SAR1B, CMRD |
| Androgen insensitivity, 300068 (3) | AR, DHTR, TFM, SBMA, KD, SMAX1 |
| Anemia, congenital dyserythropoietic, type I, | CDAN1, CDA1 |
| 224120 (3) | |
| Anemia, Diamond-Blackfan, 105650 (3) | RPS19, DBA |
| Anemia, hemolytic, due to PK deficiency (3) | PKLR, PK1 |
| Anemia, hemolytic, due to UMPH1 | NT5C3, UMPH1, PSN1 |
| deficiency, 266120 (3) | |
| Anemia, hemolytic, Rh-null, regulator type, | RHAG, RH50A |
| 268150 (3) | |
| Anemia, hypochromic microcytic, 206100 | NRAMP2 |
| (3) | |
| Anemia, neonatal hemolytic, fatal and near- | SPTB |
| fatal (3) | |
| Anemia, sideroblastic/hypochromic (3) | ALAS2, ANH1, ASB |
| Anemia, sideroblastic, with ataxia, 301310 | ABCB7, ABC7, ASAT |
| (3) | |
| Aneurysm, familial arterial (3) | COL3A1 |
| Angelman syndrome, 105830 (3) | MECP2, RTT, PPMX, MRX16, MRX79 |
| Angelman syndrome, 105830 (3) | UBE3A, ANCR |
| Angioedema, hereditary, 106100 (3) | C1NH, HAE1, HAE2, SERPING1 |
| Angioedema induced by ACE inhibitors, | XPNPEP2 |
| susceptibility to (3) | |
| Angiofibroma, sporadic (3) | MEN1 |
| Angiotensin I-converting enzyme, benign | ACE, DCP1, ACE1 |
| serum increase (3) | |
| Anhaptoglobinemia (3) | HP |
| Aniridia, type II, 106210 (3) | PAX6, AN2, MGDA |
| Ankylosing spoldylitis, susceptibility to, | HLA-B |
| 106300 (3) | |
| Anophthalmia 3, 206900 (3) | SOX2, ANOP3 |
| Anorexia nervosa, susceptibility to, 606788 | HTR2A |
| (3) | |
| Anterior segment anomalies and cataract | EYA1, BOR |
| (3) | |
| Anterior segment mesenchymal dysgenesis, | FOXE3, FKHL12, ASMD |
| 107250 (3) | |
| Anterior segment mesenchymal dysgenesis | FOXC1, FKHL7, FREAC3 |
| (3) | |
| Anterior segment mesenchymal dysgenesis | PITX3 |
| and cataract, 107250 (3) | |
| Antithrombin III deficiency (3) | AT3 |
| Antley-Bixler syndrome, 207410 (3) | POR |
| Anxiety-related personality traits (3) | SLC6A4, HIT, OCD1 |
| Aortic aneurysm, ascending, and dissection | FBN1, MFS1, WMS |
| (3) | |
| Apert syndrome, 101200 (3) | FGFR2, BEK, CFD1, JWS |
| Aplasia of lacrimal and salivary glands, | FGF10 |
| 180920 (3) | |
| Aplastic anemia, 609135 (3) | IFNG |
| Aplastic anemia, 609135 (3) | TERC, TRC3, TR |
| Aplastic anemia, susceptibility to, 609135 | TERT, TCS1, EST2 |
| (3) | |
| Apnea, postanesthetic (3) | BCHE, CHE1 |
| ApoA-I and apoC-III deficiency, combined | APOA1 |
| (3) | |
| Apolipoprotein A-II deficiency (3) | APOA2 |
| Apolipoprotein C3 deficiency (3) | APOC3 |
| Apolipoprotein H deficiency (3) | APOH |
| Apparent mineralocorticoid excess, | HSD11B2, HSD11K |
| hypertension due to (3) | |
| Aquaporin-1 deficiency (3) | AQP1, CHIP28, CO |
| ARC syndrome, 208085 (3) | VPS33B |
| Argininemia, 207800 (3) | ARG1 |
| Argininosuccinic aciduria, 207900 (3) | ASL |
| Aromatase deficiency (3) | CYP19A1, CYP19, ARO |
| Aromatic L-amino acid decarboxylase | DDC |
| deficiency, 608643 (3) | |
| Arrhythmogenic right ventricular dysplasia 2, | RYR2, VTSIP |
| 600996 (3) | |
| Arrhythmogenic right ventricular dysplasia 8, | DSP, KPPS2, PPKS2 |
| 607450 (3) | |
| Arrhythmogenic right ventricular dysplasia, | PKP2, ARVD9 |
| familial, 9, 609040 (3) | |
| Arthrogryposis multiplex congenita, distal, | TPM2, TMSB, AMCD1, DA1 |
| type 1, 108120 (3) | |
| Arthrogryposis multiplex congenita, distal, | TNNI2, AMCD2B, DA2B, FSSV |
| type 2B, 601680 (3) | |
| Arthropathy, progressive | WISP3, PPAC, PPD |
| pseudorheumatoid, of childhood, 208230 (3) | |
| Arthyrgryposis multiplex congenita, distal, | TNNT3, AMCD2B, DA2B, FSSV |
| type 2B, 601680 (3) | |
| Aspartylglucosaminuria (3) | AGA |
| Asperger syndrome, 300494 (3) | NLGN3 |
| Asperger syndrome, 300497 (3) | NLGN4, KIAA1260, AUTSX2 |
| Asthma, 600807 (3) | PHF11, NYREN34 |
| Asthma, atopic, susceptibility to (3) | MS4A2, FCER1B |
| Asthma, dimished response to | ALOX5 |
| antileukotriene treatment in, 600807 (3) | |
| Asthma, nocturnal, susceptibility to (3) | ADRB2 |
| Asthma, susceptibility to, 1, 607277 (3) | PTGDR, AS1 |
| Asthma, susceptibility to, 2, 608584 (3) | GPR154, GPRA, VRR1, PGR14 |
| Asthma, susceptibility to (3) | HNMT |
| Asthma, susceptibility to, 600807 (3) | IL12B, NKSF2 |
| Asthma, susceptibility to, 600807 (3) | IL13, ALRH |
| Asthma, susceptibility to, 600807 (3) | PLA2G7, PAFAH |
| Asthma, susceptibility to, 600807 (3) | SCGB3A2, UGRP1 |
| Asthma, susceptibility to, 600807 (3) | TNF, TNFA |
| Asthma, susceptibility to, 600807 (3) | UGB, CC10, CCSP, SCGB1A1 |
| Ataxia, cerebellar, Cayman type, 601238 (3) | ATCAY, CLAC, KIAA1872 |
| Ataxia, early-onset, with oculomotor apraxia | APTX, AOA, AOA1 |
| and hypoalbuminemia, 208920 (3) | |
| Ataxia, episodic (3) | CACNB4, EJM |
| Ataxia-ocular apraxia-2, 606002 (3) | SETX, SCAR1, AOA2 |
| Ataxia-telangiectasia, 208900 (3) | ATM, ATA, AT1 |
| Ataxia-telangiectasia-like disorder, 604391 | MRE11A, MRE11, ATLD |
| (3) | |
| Ataxia with isolated vitamin E deficiency, | TTPA, TTP1, AVED |
| 277460 (3) | |
| Atelosteogenesis II, 256050 (3) | SLC26A2, DTD, DTDST, D5S1708, |
| | EDM4 |
| Atelostogenesis, type I, 108720 (3) | FLNB, SCT, AOI |
| Athabaskan brainstem dysgenesis | HOXA1, HOX1F, BSAS |
| syndrome, 601536 (3) | |
| Atherosclerosis, susceptibility to (3) | ALOX5 |
| Atopy, 147050 (3) | SPINK5, LEKTI |
| Atopy, resistance to, 147050 (3) | HAVCR1, HAVCR |
| Atopy, susceptibility to, 147050 (3) | PLA2G7, PAFAH |
| Atopy, susceptibility to, 147050 (3) | SELP, GRMP |
| Atopy, susceptibility to (3) | IL4R, IL4RA |
| Atransferrinemia, 209300 (3) | TF |
| Atrial fibrillation, familial, 607554 (3) | KCNE2, MIRP1, LQT6 |
| Atrial fibrillation, familial, 607554 (3) | KCNQ1, KCNA9, LQT1, KVLQT1, |
| | ATFB1 |
| Atrial septal defect-2, 607941 (3) | GATA4 |
| Atrial septal defect 3 (3) | MYH6, ASD3, MYHCA |
| Atrial septal defect with atrioventricular | NKX2E, CSX |
| conduction defects, 108900 (3) | |
| Atrichia with papular lesions, 209500 (3) | HR, AU |
| Atrioventricular block, idiopathic second- | NKX2E, CSX |
| degree (3) | |
| Atrioventricular septal defect, 600309 (3) | GJA1, CX43, ODDD, SDTY3, ODOD |
| Atrioventricular septal defect, partial, with | CRELD1, AVSD2 |
| heterotaxy syndrome, 606217 (3) | |
| Atrioventricular septal defect, susceptibility | CRELD1, AVSD2 |
| to, 2, 606217 (3) | |
| Attention deficit-hyperactivity disorder, | DRD5, DRD1B, DRD1L2 |
| susceptibility to, 143465 (3) | |
| Autism, susceptibility to, 209850 (3) | GLO1 |
| Autism, X-linked, 300425 (3) | MECP2, RTT, PPMX, MRX16, MRX79 |
| Autism, X-linked, 300425 (3) | NLGN3 |
| Autism, X-linked, 300495 (3) | NLGN4, KIAA1260, AUTSX2 |
| Autoimmune lymphoproliferative syndrome, | TNFRSF6, APT1, FAS, CD95, ALPS1A |
| 601859 (3) | |
| Autoimmune lymphoproliferative syndrome, | TNFRSF6, APT1, FAS, CD95, ALPS1A |
| type IA, 601859 (3) | |
| Autoimmune lymphoproliferative syndrome, | CASP10, MCH4, ALPS2 |
| type II, 603909 (3) | |
| Autoimmune lymphoproliferative syndrome, | CASP8, MCH5 |
| type IIB, 607271 (3) | |
| Autoimmune polyglandular disease, type I, | AIRE, APECED |
| 240300 (3) | |
| Autoimmune thyroid disease, susceptibility | TG, AITD3 |
| to 3, 608175 (3) | |
| Autonomic nervous system dysfunction (3) | DRD4 |
| Axenfeld anomaly (3) | FOXC1, FKHL7, FREAC3 |
| Azoospermia (3) | USP9Y, DFFRY |
| Azoospermia due to perturbations of | SYCP3, SCP3, COR1 |
| meiosis, 270960 (3) | |
| Bamforth-Lazarus syndrome, 241850 (3) | FOXE1, FKHL15, TITF2, TTF2 |
| Bannayan-Riley-Ruvalcaba syndrome, | PTEN, MMAC1 |
| 153480 (3) | |
| Bannayan-Zonana syndrome, 153480 (3) | PTEN, MMAC1 |
| Bardet-Biedl syndrome 1, 209900 (3) | BBS1 |
| Bardet-Biedl syndrome 1, modifier of, | ARL6, BBS3 |
| 209900 (3) | |
| Bardet-Biedl syndrome, 209900 (3) | BBS7 |
| Bardet-Biedl syndrome 2, 209900 (3) | BBS2 |
| Bardet-Biedl syndrome 3, 600151 (3) | ARL6, BBS3 |
| Bardet-Biedl syndrome 4, 209900 (3) | BBS4 |
| Bardet-Biedl syndrome 5, 209900 (3) | BBS5 |
| Bardet-Biedl syndrome 6, 209900 (3) | MKKS, HMCS, KMS, MKS, BBS6 |
| Bardet-Biedl syndrome 8, 209900 (3) | TTC8, BBS8 |
| Bare lymphocyte syndrome, type I, 604571 | TAPBP, TPSN |
| (3) | |
| Bare lymphocyte syndrome, type I, due to | TAP2, ABCB3, PSF2, RING11 |
| TAP2 deficiency, 604571 (3) | |
| Bare lymphocyte syndrome, type II, | MHC2TA, C2TA |
| complementation group A, 209920 (3) | |
| Bare lymphocyte syndrome, type II, | RFX5 |
| complementation group C, 209920 (3) | |
| Bare lymphocyte syndrome, type II, | RFXAP |
| complementation group D, 209920 (3) | |
| Bare lymphocyte syndrome, type II, | RFX5 |
| complementation group E, 209920 (3) | |
| Barth syndrome, 302060 (3) | TAZ, EFE2, BTHS, CMD3A, LVNCX |
| Bart-Pumphrey syndrome, 149200 (3) | GJB2, CX26, DFNB1, PPK, DFNA3, |
| | KID, HID |
| Bartter syndrome, type 1, 601678 (3) | SLC12A1, NKCC2 |
| Bartter syndrome, type 2, 241200 (3) | KCNJ1, ROMK1 |
| Bartter syndrome, type 3, 607364 (3) | CLCNKB |
| Bartter syndrome, type 4, 602522 (3) | BSND |
| Bartter syndrome, type 4, digenic, 602522 | CLCNKA |
| (3) | |
| Bartter syndrome, type 4, digenic, 602522 | CLCNKB |
| (3) | |
| Basal cell carcinoma (3) | RASA1, GAP, CMAVM, PKWS |
| Basal cell carcinoma, somatic, 605462 (3) | PTCH2 |
| Basal cell carcinoma, somatic, 605462 (3) | PTCH, NBCCS, BCNS, HPE7 |
| Basal cell carcinoma, sporadic (3) | SMOH, SMO |
| Basal cell nevus syndrome, 109400 (3) | PTCH, NBCCS, BCNS, HPE7 |
| Basal ganglia disease, adult-onset, 606159 | FTL |
| (3) | |
| Basal ganglia disease, biotin-responsive, | SLC19A3 |
| 607483 (3) | |
| B-cell non-Hodgkin lymphoma, high-grade | BCL7A, BCL7 |
| (3) | |
| BCG infection, generalized familial (3) | IFNGR1 |
| Beare-Stevenson cutis gyrata syndrome, | FGFR2, BEK, CFD1, JWS |
| 123790 (3) | |
| Becker muscular dystrophy, 300376 (3) | DMD, BMD |
| Becker muscular dystrophy modifier, | MYF6 |
| 310200 (3) | |
| Beckwith-Wiedemann syndrome, 130650 | CDKN1C, KIP2, BWS |
| (3) | |
| Beckwith-Wiedemann syndrome, 130650 | H19, D11S813E, ASM1, BWS |
| (3) | |
| Beckwith-Wiedemann syndrome, 130650 | KCNQ10T1, LIT1 |
| (3) | |
| Beckwith-Wiedemann syndrome, 130650 | NSD1, ARA267, STO |
| (3) | |
| Benzene toxicity, susceptibility to (3) | NQO1, DIA4, NMOR1 |
| Bernard-Soulier syndrome, 231200 (3) | GP1BA |
| Bernard-Soulier syndrome, type B, 231200 | GP1BB |
| (3) | |
| Bernard-Soulier syndrome, type C (3) | GP9 |
| Beryllium disease, chronic, susceptibility to | HLA-DPB1 |
| (3) | |
| Beta-2-adrenoreceptor agonist, reduced | ADRB2 |
| response to (3) | |
| Beta-ureidopropionase deficiency (3) | UPB1, BUP1 |
| Bethlem myopathy, 158810 (3) | COL6A1, OPLL |
| Bethlem myopathy, 158810 (3) | COL6A2 |
| Bethlem myopathy, 158810 (3) | COL6A3 |
| Bietti crystalline corneoretinal dystrophy, | CYP4V2, BCD |
| 210370 (3) | |
| Bile acid malabsorption, primary (3) | SLC10A2, NTCP2 |
| Biotinidase deficiency, 253260 (3) | BTD |
| Bipolar disorder, susceptibility to, 125480 | XBP1, XBP2 |
| (3) | |
| Birt-Hogg-Dube syndrome, 135150 (3) | FLCN, BHD |
| Bladder cancer, 109800 (3) | FGFR3, ACH |
| Bladder cancer, 109800 (3) | KRAS2, RASK2 |
| Bladder cancer, 109800 (3) | RB1 |
| Bladder cancer, somatic, 109800 (3) | HRAS |
| Blau syndrome, 186580 (3) | CARD15, NOD2, IBD1, CD, ACUG, |
| | PSORAS1 |
| Bleeding disorder due to defective | TBXA2R |
| thromboxane A2 receptor (3) | |
| Bleeding due to platelet ADP receptor | P2RX1, P2X1 |
| defect, 600515 (3) | |
| Blepharophimosis, epicanthus inversus, and | FOXL2, BPES, BPES1, PFRK, POF3 |
| ptosis, type 1, 110100 (3) | |
| Blepharophimosis, epicanthus inversus, and | FOXL2, BPES, BPES1, PFRK, POF3 |
| ptosis, type 2, 110100 (3) | |
| Blepharospasm, primary benign, 606798 (3) | DRD5, DRD1B, DRD1L2 |
| Blood group, ABO system (3) | ABO |
| Blood group, Auberger system (3) | LU, AU, BCAM |
| Blood group, Colton, 110450 (3) | AQP1, CHIP28, CO |
| Blood group Cromer (3) | DAF |
| Blood group, Diego, 110500 (3) | SLC4A1, AE1, EPB3 |
| Blood group, Dombrock (3) | ART4, DO |
| Blood group, Gerbich (3) | GYPC, GE, GPC |
| Blood group GIL, 607457 (3) | AQP3 |
| Blood group, Ii, 110800 (3) | GCNT2 |
| Blood group, Indian system (3) | CD44, MDU2, MDU3, MIC4 |
| Blood group, Kell (3) | KEL |
| Blood group, Kidd (3) | SLC14A1, JK, UTE, UT1 |
| Blood group, Knops system, 607486 (3) | CR1, C3BR |
| Blood group, Landsteiner-Wiener (3) | LW |
| Blood group, Lewis (3) | FUT3, LE |
| Blood group, Lutheran system (3) | LU, AU, BCAM |
| Blood group, MN (3) | GYPA, MN, GPA |
| Blood group, OK, 111380 (3) | BSG |
| Blood group, P system, 111400 (3) | A4GALT, PK |
| Blood group, P system, 111400 (3) | B3GALT3, GLCT3, P |
| Blood group, Rhesus (3) | RHCE |
| Blood group, Ss (3) | GYPB, SS, MNS |
| Blood group, Waldner, 112010 (3) | SLC4A1, AE1, EPB3 |
| Blood group, Wright, 112050 (3) | SLC4A1, AE1, EPB3 |
| Blood group, XG system (3) | XG |
| Blood group, Yt system, 112100 (3) | ACHE, YT |
| Bloom syndrome, 210900 (3) | RECQL3, RECQ2, BLM, BS |
| Blue-cone monochromacy, 303700 (3) | OPN1LW, RCP, CBP, CBBM |
| Blue-cone monochromacy, 303700 (3) | OPN1MW, GCP, CBD, CBBM |
| Bombay phenotype (3) | FUT1, H, HH |
| Bombay phenotype (3) | FUT2, SE |
| Bone mineral density variability 1, 601884 | LRP5, BMND1, LRP7, LR3, OPPG, |
| (3) | VBCH2 |
| Borjeson-Forssman-Lehmann syndrome, | PHF6, BFLS |
| 301900 (3) | |
| Bosley-Salih-Alorainy syndrome, 601536 (3) | HOXA1, HOX1F, BSAS |
| Bothnia retinal dystrophy, 607475 (3) | RLBP1 |
| Brachydactyly, type A1, 112500 (3) | IHH, BDA1 |
| Brachydactyly, type A2, 112600 (3) | BMPR1B, ALK6 |
| Brachydactyly, type B1, 113000 (3) | ROR2, BDB1, BDB, NTRKR2 |
| Brachydactyly, type C, 113100 (3) | GDF5, CDMP1 |
| Brachydactyly, type D, 113200 (3) | HOXD13, HOX4I, SPD |
| Brachydactyly, type E, 113300 (3) | HOXD13, HOX4I, SPD |
| Bradyopsia, 608415 (3) | R9AP, RGS9, PERRS |
| Bradyopsia, 608415 (3) | RGS9, PERRS |
| Branchiootic syndrome (3) | EYA1, BOR |
| Branchiootorenal syndrome, 113650 (3) | EYA1, BOR |
| Branchiootorenal syndrome with cataract, | EYA1, BOR |
| 113650 (3) | |
| Breast and colorectal cancer, susceptibility | CHEK2, RAD53, CHK2, CDS1, LFS2 |
| to (3) | |
| Breast cancer, 114480 (3) | PIK3CA |
| Breast cancer, 114480 (3) | PPM1D, WIP1 |
| Breast cancer, 114480 (3) | SLC22A1L, BWSCR1A, IMPT1 |
| Breast cancer, 114480 (3) | TP53, P53, LFS1 |
| Breast cancer-1 (3) | BRCA1, PSCP |
| Breast cancer 2, early onset (3) | BRCA2, FANCD1 |
| Breast cancer (3) | TSG101 |
| Breast cancer, early-onset, 114480 (3) | BRIP1, BACH1, FANCJ |
| Breast cancer, invasive intraductal (3) | RAD54L, HR54, HRAD54 |
| Breast cancer, lobular (3) | CDH1, UVO |
| Breast cancer, male, susceptibility to, | BRCA2, FANCD1 |
| 114480 (3) | |
| Breast cancer, male, with Reifenstein | AR, DHTR, TFM, SBMA, KD, SMAX1 |
| syndrome (3) | |
| Breast cancer, somatic, 114480 (3) | KRAS2, RASK2 |
| Breast cancer, somatic, 114480 (3) | RB1CC1, CC1, KIAA0203 |
| Breast cancer, sporadic (3) | PHB |
| Breast cancer, susceptibility to, 114480 (3) | ATM, ATA, AT1 |
| Breast cancer, susceptibility to, 114480 (3) | BARD1 |
| Breast cancer, susceptibility to, 114480 (3) | CHEK2, RAD53, CHK2, CDS1, LFS2 |
| Breast cancer, susceptibility to, 114480 (3) | RAD51A, RECA |
| Breast cancer, susceptibility to (3) | XRCC3 |
| Breast-ovarian cancer (3) | BRCA1, PSCP |
| Brody myopathy, 601003 (3) | ATP2A1, SERCA1 |
| Bruck syndrome 2, 609220 (3) | PLOD2 |
| Brugada syndrome, 601144 (3) | SCN5A, LQT3, IVF, HB1, SSS1 |
| Brunner syndrome (3) | MAOA |
| Burkitt lymphoma, 113970 (3) | MYC |
| Buschke-Ollendorff syndrome, 166700 (3) | LEMD3, MAN1 |
| Butterfly dystrophy, retinal, 169150 (3) | RDS, RP7, PRPH2, PRPH, AVMD, |
| | AOFMD |
| C1q deficiency, type A (3) | C1QA |
| C1q deficiency, type B (3) | C1QB |
| C1q deficiency, type C (3) | C1QG |
| C1s deficiency, isolated (3) | C1S |
| C2 deficiency (3) | C2 |
| C3b inactivator deficiency (3) | IF |
| C3 deficiency (3) | C3 |
| C4 deficiency (3) | C4A, C4S |
| C4 deficiency (3) | C4B, C4F |
| C6 deficiency (3) | C6 |
| C7 deficiency (3) | C7 |
| C8 deficiency, type II (3) | C8B |
| C9 deficiency (3) | C9 |
| C9 deficiency with dermatomyositis (3) | C9 |
| Cafe-au-lait spots, multiple, with leukemia, | MSH2, COCA1, FCC1, HNPCC1 |
| 114030 (3) | |
| Cafe-au-lait spots with glioma or leukemia, | MLH1, COCA2, HNPCC2 |
| 114030 (3) | |
| Caffey disease, 114000 (3) | COL1A1 |
| Calcinosis, tumoral, 211900 (3) | FGF23, ADHR, HPDR2, PHPTC |
| Calcinosis, tumoral, 211900 (3) | GALNT3 |
| Campomelic dysplasia, 114290 (3) | SOX9, CMD1,SRA1 |
| Campomelic dysplasia with autosomal sex | SOX9, CMD1, SRA1 |
| reversal, 114290 (3) | |
| Camptodactyly-arthropathy-coxa vara- | PRG4, CACP, MSF, SZP, HAPO |
| pericarditis syndrome, 208250 (3) | |
| Camurati-Engelmann disease, 131300 (3) | TGFB1, DPD1, CED |
| Canavan disease, 271900 (3) | ASPA |
| Cancer progression/metastasis (3) | FGFR4 |
| Cancer susceptibility (3) | MSH6, GTBP, HNPCC5 |
| Capillary malformation-arteriovenous | RASA1, GAP, CMAVM, PKWS |
| malformation, 608354 (3) | |
| Carbamoylphosphate synthetase I | CPS1 |
| deficiency, 237300 (3) | |
| Carbohydrate-deficient glycoprotein | PMM2, CDG1 |
| syndrome, type I, 212065 (3) | |
| Carbohydrate-deficient glycoprotein | MPI, PMI1 |
| syndrome, type Ib, 602579 (3) | |
| Carbohydrate-deficient glycoprotein | MGAT2, CDGS2 |
| syndrome, type II, 212066 (3) | |
| Carboxypeptidase N deficiency, 212070 (3) | CPN1, SCPN, CPN |
| Carcinoid tumor of lung (3) | MEN1 |
| Carcinoid tumors, intestinal, 114900 (3) | SDHD, PGL1 |
| Cardioencephalomyopathy, fatal infantile, | SCO2 |
| due to cytochrome c oxidase deficiency, | |
| 604377 (3) | |
| Cardiomyopathy, Familial hypertrophic, 8, | MYL3, CMH8 |
| 608751 (3) | |
| Cardiomyopathy, dilated, 115200 (3) | ACTC |
| Cardiomyopathy, dilated, 115200 (3) | MYH7, CMH1, MPD1 |
| Cardiomyopathy, dilated, 1A, 115200 (3) | LMNA, LMN1, EMD2, FPLD, CMD1A, |
| | HGPS, LGMD1B |
| Cardiomyopathy, dilated, 1D, 601494 (3) | TNNT2, CMH2, CMD1D |
| Cardiomyopathy, dilated, 1G, 604145 (3), | TTN, CMD1G, TMD, LGMD2J |
| Tibial muscular dystrophy, tardive, 600334 | |
| (3) | |
| Cardiomyopathy, dilated, 1I, 604765 (3) | DES, CMD1I |
| Cardiomyopathy, dilated, 1J, 605362 (3) | EYA4, DFNA10, CMD1J |
| Cardiomyopathy, dilated, 1L, 606685 (3) | SGCD, SGD, LGMD2F, CMD1L |
| Cardiomyopathy, dilated, 1M, 607482 (3) | CSRP3, CRP3, CLP, CMD1M |
| Cardiomyopathy, dilated, 1N, 607487 (3) | TCAP, LGMD2G, CMD1N |
| Cardiomyopathy, dilated, with ventricular | ABCC9, SUR2 |
| tachycardia, 608569 (3) | |
| Cardiomyopathy, dilated, X-linked, 302045 | DMD, BMD |
| (3) | |
| Cardiomyopathy, familial hypertrophic, 10, | MYL2, CMH10 |
| 608758 (3) | |
| Cardiomyopathy, familial hypertrophic, 1, | MYH7, CMH1, MPD1 |
| 192600 (3) | |
| Cardiomyopathy, familial hypertrophic, | ACTC |
| 192600 (3) | |
| Cardiomyopathy, familial hypertrophic, | CAV3, LGMD1C |
| 192600 (3) | |
| Cardiomyopathy, familial hypertrophic, | MYH6, ASD3, MYHCA |
| 192600 (3) | |
| Cardiomyopathy, familial hypertrophic, | TNNC1 |
| 192600 (3) ( ) | |
| Cardiomyopathy, familial hypertrophic, 2, | TNNT2, CMH2, CMD1D |
| 115195 (3) | |
| Cardiomyopathy, familial hypertrophic, 3, | TPM1, CMH3 |
| 115196 (3) | |
| Cardiomyopathy, familial hypertrophic (3) | TNNI3 |
| Cardiomyopathy, familial hypertrophic, 4, | MYBPC3, CMH4 |
| 115197 (3) | |
| Cardiomyopathy, familial hypertrophic, 9 (3) | TTN, CMD1G, TMD, LGMD2J |
| Cardiomyopathy, familial restrictive, 115210 | TNNI3 |
| (3) | |
| Cardiomyopathy, hypertrophic, early-onset | COX15 |
| fatal (3) | |
| Cardiomyopathy, hypertrophic, mid-left | MYL2, CMH10 |
| ventricular chamber type, 608758 (3) | |
| Cardiomyopathy, hypertrophic, | MYLK2, MLCK |
| midventricular, digenic, 192600 (3) | |
| Cardiomyopathy, hypertrophic, with WPW, | PRKAG2, WPWS |
| 600858 (3) | |
| Cardiomyopathy, idiopathic dilated, 115200 | PLN, PLB |
| (3) | |
| Cardiomyopathy, X-linked dilated, 300069 | TAZ, EFE2, BTHS, CMD3A, LVNCX |
| (3) | |
| Carney complex, type 1, 160980 (3) | PRKAR1A, TSE1, CNC1, CAR |
| Carney complex variant, 608837 (3) | MYH8 |
| Carnitine-acylcarnitine translocase | SLC25A20, CACT, CAC |
| deficiency (3) | |
| Carnitine deficiency, systemic primary, | SLC22A5, OCTN2, CDSP, SCD |
| 212140 (3) | |
| Carpal tunnel syndrome, familial (3) | TTR, PALB |
| Cartilage-hair hypoplasia, 250250 (3) | RMRP, RMRPR, CHH |
| Cataract, autosomal dominant nuclear (3) | CRYAA, CRYA1 |
| Cataract, cerulean, type 2, 601547 (3) | CRYBB2, CRYB2 |
| Cataract, congenital (3) | PITX3 |
| Cataract, congenital, 604219 (3) | BFSP2, CP49, CP47 |
| Cataract, congenital progressive, autosomal | CRYAA, CRYA1 |
| recessive (3) | |
| Cataract, congenital, with late-onset corneal | PAX6, AN2, MGDA |
| dystrophy (3) | |
| Cataract, congenital zonular, with sutural | CRYBA1, CRYB1 |
| opacities, 600881 (3) | |
| Cataract, Coppock-like, 604307 (3) | CRYGC, CRYG3, CCL |
| Cataract, cortical pulverulent, late-onset (3) | LIM2, MP19 |
| Cataract, crystalline aculeiform, 115700 (3) | CRYGD, CRYG4 |
| Cataract, juvenile-onset, 604219 (3) | BFSP2, CP49, CP47 |
| Cataract, lamellar, 116800 (3) | HSF4, CTM |
| Cataract, Marner type, 116800 (3) | HSF4, CTM |
| Cataract, polymorphic and lamellar, 604219 | MIP, AQP0 |
| (3) | |
| Cataract, posterior polar 2 (3) | CRYAB, CRYA2, CTPP2 |
| Cataract, pulverulent (3) | CRYBB1 |
| Cataracts, punctate, progressive juvenile- | CRYGD, CRYG4 |
| onset (3) | |
| Cataract, sutural, with punctate and | CRYBB2, CRYB2 |
| cerulean opacities, 607133 (3) | |
| Cataract, variable zonular pulverulent (3) | CRYGC, CRYG3, CCL |
| Cataract, zonular central nuclear, autosomal | CRYAA, CRYA1 |
| dominant (3) | |
| Cataract, zonular pulverulent-1, 116200 (3) | GJA8, CX50, CAE1 |
| Cataract, zonular pulverulent-3, 601885 (3) | GJA3, CX46, CZP3, CAE3 |
| Cavernous malformations of CNS and | CCM1, CAM, KRIT1 |
| retina, 116860 (3) | |
| CD59 deficiency (3) | CD59, MIC11 |
| CD8 deficiency, familial, 608957 (3) | CD8A |
| Central core disease, 117000 (3) | RYR1, MHS, CCO |
| Central core disease, one form (3) ( ) | MYH7, CMH1, MPD1 |
| Central hypoventilation syndrome, 209880 | GDNF |
| (3) | |
| Central hypoventilation syndrome, | BDNF |
| congenital, 209880 (3) | |
| Central hypoventilation syndrome, | EDN3 |
| congenital, 209880 (3) | |
| Central hypoventilation syndrome, | PMX2B, NBPHOX, PHOX2B |
| congenital, 209880 (3) | |
| Central hypoventilation syndrome, | RET, MEN2A |
| congenital, 209880 (3) | |
| Cerebellar ataxia, 604290 (3) | CP |
| Cerebellar ataxia, pure (3) | CACNA1A, CACNL1A4, SCA6 |
| Cerebellar hypoplasia, VLDLR-associated, | VLDLR, VLDLRCH |
| 224050 (3) | |
| Cerebral amyloid angiopathy, 105150 (3) | ABCA1, ABC1, HDLDT1, TGD |
| Cerebral amyloid angiopathy, 105150 (3) | CST3 |
| Cerebral arteriopathy with subcortical | NOTCH3, CADASIL, CASIL |
| infarcts and leukoencephalopathy, 125310 | |
| (3) | |
| Cerebral cavernous malformations-1, | CCM1, CAM, KRIT1 |
| 116860 (3) | |
| Cerebral cavernous malformations-2, | C7orf22, CCM2, MGC4067 |
| 603284 (3) | |
| Cerebral cavernous malformations 3, | PDCD10, TFAR15, CCM3 |
| 603285 (3) | |
| Cerebral dysgenesis, neuropathy, | SNAP29, CEDNIK |
| ichthyosis, and palmoplantar keratoderma | |
| syndrome, 609528 (3) | |
| Cerebrooculofacioskeletal syndrome, | ERCC2, EM9 |
| 214150 (3) | |
| Cerebrooculofacioskeletal syndrome, | ERCC5, XPG |
| 214150 (3) | |
| Cerebrooculofacioskeletal syndrome | ERCC6, CKN2, COFS, CSB |
| 214150 (3) | |
| Cerebrotendinous xanthomatosis, 213700 | CYP27A1, CYP27, CTX |
| (3) | |
| Cerebrovascular disease, occlusive (3) | SERPINA3, AACT, ACT |
| Ceroid lipofuscinosis, neuronal-1, infantile, | PPT1, CLN1 |
| 256730 (3) | |
| Ceroid-lipofuscinosis, neuronal 2, classic | CLN2 |
| late infantile, 204500 (3) | |
| Ceroid-lipofuscinosis, neuronal-3, juvenile, | CLN3, BTS |
| 204200 (3) | |
| Ceroid-lipofuscinosis, neuronal-5, variant | CLN5 |
| late infantile, 256731 (3) | |
| Ceroid-lipofuscinosis, neuronal-6, variant | CLN6 |
| late infantile, 601780 (3) | |
| Ceroid lipofuscinosis, neuronal 8, 600143 | CLN8, EPMR |
| (3) | |
| Ceroid lipofuscinosis, neuronal, variant | PPT1, CLN1 |
| juvenile type, with granular osmiophilic | |
| deposits (3) | |
| Cervical cancer, somatic, 603956 (3) | FGFR3, ACH |
| CETP deficiency, 607322 (3) | CETP |
| Chanarin-Dorfman syndrome, 275630 (3) | ABHD5, CGI58, IECN2, NCIE2 |
| Charcot-Marie-Tooth disease, axonal, type | HSPB1, HSP27, CMT2F |
| 2F, 606595 (3) | |
| Charcot-Marie-Tooth disease, dominant | MPZ, CMT1B, CMTDI3, CHM, DSS |
| intermediate 3, 607791 (3) | |
| Charcot-Marie-Tooth disease, dominant | DNM2 |
| intermediate B, 606482 (3) | |
| Charcot-Marie-Tooth disease, foot deformity | HOXD10, HOX4D |
| of (3) | |
| Charcot-Marie-Tooth disease, mixed axonal | GDAP1, CMT4A, CMT2K, CMT2G |
| and demyelinating type, 214400 (3) | |
| Charcot-Marie-Tooth disease, type 1A, | PMP22, CMT1A, CMT1E, DSS |
| 118220 (3) | |
| Charcot-Marie-Tooth disease, type 1B, | MPZ, CMT1B, CMTDI3, CHM, DSS |
| 118200 (3) | |
| Charcot-Marie-Tooth disease, type 1C, | LITAF, CMT1C |
| 601098 (3) | |
| Charcot-Marie-Tooth disease, type 1D, | EGR2, KROX20 |
| 607678 (3) | |
| Charcot-Marie-Tooth disease, type 1E, | PMP22, CMT1A, CMT1E, DSS |
| 118300 (3) | |
| Charcot-Marie-Tooth disease, type 1F, | NEFL, CMT2E, CMT1F |
| 607734 (3) | |
| Charcot-Marie-Tooth disease, type 2A1, | KIF1B, CMT2A, CMT2A1 |
| 118210 (3) | |
| Charcot-Marie-Tooth disease, type 2A2, | MFN2, KIAA0214, CMT2A2 |
| 609260 (3) | |
| Charcot-Marie-Tooth disease, type 2B, | RAB7, CMT2B, PSN |
| 600882 (3) | |
| Charcot-Marie-Tooth disease, type 2D, | GARS, SMAD1, CMT2D |
| 601472 (3) | |
| Charcot-Marie-Tooth disease, type 2E, | NEFL, CMT2E, CMT1F |
| 607684 (3) | |
| Charcot-Marie-Tooth disease, type 2G, | GDAP1, CMT4A, CMT2K, CMT2G |
| 607706 (3) | |
| Charcot-Marie-Tooth disease, type 2I, | MPZ, CMT1B, CMTDI3, CHM, DSS |
| 607677 (3) | |
| Charcot-Marie-Tooth disease, type 2J, | MPZ, CMT1B, CMTDI3, CHM, DSS |
| 607736 (3) | |
| Charcot-Marie-Tooth disease, type 2K, | GDAP1, CMT4A, CMT2K, CMT2G |
| 607831 (3) | |
| Charcot-Marie-Tooth disease, type 4A, | GDAP1, CMT4A, CMT2K, CMT2G |
| 214400 (3) | |
| Charcot-Marie-Tooth disease, type 4B1, | MTMR2, CMT4B1 |
| 601382 (3) | |
| Charcot-Marie-Tooth disease, type 4B2, | SBF2, MTMR13, CMT4B2 |
| 604563 (3) | |
| Charcot-Marie-Tooth disease, type 4B2, | SBF2, MTMR13, CMT4B2 |
| with early-onset glaucoma, 607739 (3) | |
| Charcot-Marie-Tooth disease, type 4C, | KIAA1985 |
| 601596 (3) | |
| Charcot-Marie-Tooth disease, type 4D, | NDRG1, HMSNL, CMT4D |
| 601455 (3) | |
| Charcot-Marie-Tooth neuropathy, X-linked | GJB1, CX32, CMTX1 |
| dominant, 1, 302800 (3) | |
| CHARGE syndrome, 214800 (3) | CHD7 |
| Char syndrome, 169100 (3) | TFAP2B, CHAR |
| Chediak-Higashi syndrome, 214500 (3) | CHS1, LYST |
| Cherubism, 118400 (3) | SH3BP2, CRPM |
| CHILD syndrome, 308050 (3) | NSDHL |
| Chitotriosidase deficiency (3) | CHIT |
| Chloride diarrhea, congenital, Finnish type, | SLC26A3, DRA, CLD |
| 214700 (3) | |
| Cholelithiasis, 600803 (3) | ABCB4, PGY3, MDR3 |
| Cholestasis, benign recurrent intrahepatic, | ATP8B1, FIC1, BRIC, PFIC1 |
| 243300 (3) | |
| Cholestasis, familial intrahepatic, of | ABCB4, PGY3, MDR3 |
| pregnancy, 147480 (3) | |
| Cholestasis, progressive familial | ATP8B1, FIC1, BRIC, PFIC1 |
| intrahepatic 1, 211600 (3) | |
| Cholestasis, progressive familial | ABCB11, BSEP, SPGP, PFIC2 |
| intrahepatic 2, 601847 (3) | |
| Cholestasis, progressive familial | ABCB4, PGY3, MDR3 |
| intrahepatic 3, 602347 (3) | |
| Cholestasis, progressive familial | HSD3B7, PFIC4 |
| intrahepatic 4, 607765 (3) | |
| Cholesteryl ester storage disease (3) | LIPA |
| Chondrocalcinosis 2, 118600 (3) | ANKH, HANK, ANK, CMDJ, CCAL2, |
| | CPPDD |
| Chondrodysplasia, Grebe type, 200700 (3) | GDF5, CDMP1 |
| Chondrodysplasia punctata, rhizomelic, type | GNPAT, DHAPAT |
| 2, 222765 (3) | |
| Chondrodysplasia punctata, X-linked | EBP, CDPX2, CPXD, CPX |
| dominant, 302960 (3) | |
| Chondrodysplasia punctata, X-linked | ARSE, CDPX1, CDPXR |
| recessive, 302950 (3) | |
| Chondrosarcoma, 215300 (3) | EXT1 |
| Chondrosarcoma, extraskeletal myxoid (3) | CSMF |
| Chondrosarcoma, extraskeletal myxoid (3) | EWSR1, EWS |
| Chorea, hereditary benign, 118700 (3) | TITF1, NKX2A, TTF1 |
| Choreoacanthocytosis, 200150 (3) | VPS13A, CHAC |
| Choreoathetosis, hypothyroidism, and | TITF1, NKX2A, TTF1 |
| respiratory distress (3) | |
| Choroideremia, 303100 (3) | CHM, TCD |
| Chromosome 22q13.3 deletion syndrome, | PSAP2, PROSAP2, KIAA1650 |
| 606232 (3) | |
| Chronic granulomatous disease, autosomal, | CYBA |
| due to deficiency of CYBA, 233690 (3) | |
| Chronic granulomatous disease due to | NCF1 |
| deficiency of NCF-1, 233700 (3) | |
| Chronic granulomatous disease due to | NCF2 |
| deficiency of NCF-2, 233710 (3) | |
| Chronic granulomatous disease, X-linked, | CYBB, CGD |
| 306400 (3) | |
| Chronic infections, due to opsonin defect (3) | MBL2, MBL, MBP1 |
| Chudley-Lowry syndrome, 309490 (3) | ATRX, XH2, XNP, MRXS3, SHS |
| Chylomicronemia syndrome, familial (3) | LPL, LIPD |
| Chylomicron retention disease, 246700 (3) | SARA2, SAR1B, CMRD |
| Chylomicron retention disease with | SARA2, SAR1B, CMRD |
| Marinesco-Sjogren syndrome, 607692 (3) | |
| Ciliary dyskinesia, primary, 1, 242650 (3) | DNAI1, CILD1, ICS, PCD |
| Ciliary dyskinesia, primary, 3 608644 (3) | DNAH5, HL1, PCD, CILD3 |
| CINCA syndrome, 607115 (3) | CIAS1, C1orf7, FCU, FCAS |
| Cirrhosis, cryptogenic (3) | KRT18 |
| Cirrhosis, cryptogenic (3) | KRT8 |
| Cirrhosis, noncryptogenic, susceptibility to, | KRT18 |
| 215600 (3) | |
| Cirrhosis, noncryptogenic, susceptibility to, | KRT8 |
| 215600 (3) | |
| Cirrhosis, North American Indian childhood | CIRH1A, NAIC, TEX292, KIAA1988 |
| type, 604901 (3) | |
| Citrullinemia, 215700 (3) | ASS |
| Citrullinemia, adult-onset type II, 603471 (3) | SLC25A13, CTLN2 |
| Citrullinemia, type II, neonatal-onset, | SLC25A13, CTLN2 |
| 605814 (3) | |
| Cleft lip/palate ectodermal dysplasia | HVEC, PVRL1, PVRR1, PRR1 |
| syndrome, 225000 (3) | |
| Cleft lip/palate, nonsyndromic, 608874 (3) | MSX1, HOX7, HYD1, OFC5 |
| Cleft palate with ankyloglossia, 303400 (3) | TBX22, CPX |
| Cleidocranial dysplasia, 119600 (3) | RUNX2, CBFA1, PEBP2A1, AML3 |
| Coats disease, 300216 (3) | NDP, ND |
| Cockayne syndrome, type A, 216400 (3) | ERCC8, CKN1, CSA |
| Cockayne syndrome, type B, 133540 (3) | ERCC6, CKN2, COFS, CSB |
| Codeine sensitivity (3) | CYP2D@, CYP2D, P450C2D |
| Coffin-Lowry syndrome, 303600 (3) | RPS6KA3, RSK2, MRX19 |
| Cohen syndrome, 216550 (3) | COH1 |
| Colchicine resistance (3) | ABCB1, PGY1, MDR1 |
| Cold-induced autoinflammatory syndrome, | CIAS1, C1orf7, FCU, FCAS |
| familial, 120100 (3) | |
| Cold-induced sweating syndrome, 272430 | CRLF1, CISS |
| (3) | |
| Coloboma, ocular, 120200 (3) | PAX6, AN2, MGDA |
| Coloboma, ocular, 120200 (3) | SHH, HPE3, HLP3, SMMCI |
| Colon adenocarcinoma (3) | RAD54B |
| Colon adenocarcinoma (3) | RAD54L, HR54, HRAD54 |
| Colon cancer (3) | BCL10 |
| Colon cancer (3) | PTPN12, PTPG1 |
| Colon cancer (3) | TGFBR2, HNPCC6 |
| Colon cancer, advanced (3) | SRC, ASV, SRC1 |
| Colon cancer, hereditary nonpolypopsis, | MLH3, HNPCC7 |
| type 7 (3) | |
| Colon cancer, somatic, 114500 (3) | PTPRJ, DEP1 |
| Colonic adenoma recurrence, reduced risk | ODC1 |
| of, 114500 (3) | |
| Colonic aganglionosis, total, with small | RET, MEN2A |
| bowel involvement (3) | |
| Colorblindness, deutan (3) | OPN1MW, GCP, CBD, CBBM |
| Colorblindness, protan (3) | OPN1LW, RCP, CBP, CBBM |
| Colorblindness, tritan (3) | OPN1SW, BCP, CBT |
| Colorectal adenomatous polyposis, | MUTYH |
| autosomal recessive, with pilomatricomas, | |
| 132600 (3) | |
| Colorectal cancer, 114500 (3) | AXIN2 |
| Colorectal cancer, 114500 (3) | BUB1B, BUBR1 |
| Colorectal cancer, 114500 (3) | EP300 |
| Colorectal cancer, 114500 (3) | PDGFRL, PDGRL, PRLTS |
| Colorectal cancer, 114500 (3) | PIK3CA |
| Colorectal cancer, 114500 (3) | TP53, P53, LFS1 |
| Colorectal cancer (3) | APC, GS, FPC |
| Colorectal cancer (3) | BAX |
| Colorectal cancer (3) | CTNNB1 |
| Colorectal cancer (3) | DCC |
| Colorectal cancer (3) | MCC |
| Colorectal cancer (3) | NRAS |
| Colorectal cancer, hereditary nonpolyposis, | MSH2, COCA1, FCC1, HNPCC1 |
| type 1, 120435 (3) | |
| Colorectal cancer, hereditary nonpolyposis, | MLH1, COCA2, HNPCC2 |
| type 2, 609310 (3) | |
| Colorectal cancer, hereditary nonpolyposis, | PMS1, PMSL1, HNPCC3 |
| type 3 (3) | |
| Colorectal cancer, hereditary nonpolyposis, | PMS2, PMSL2, HNPCC4 |
| type 4 (3) | |
| Colorectal cancer, hereditary nonpolyposis, | MSH6, GTBP, HNPCC5 |
| type 5 (3) | |
| Colorectal cancer, hereditary nonpolyposis, | TGFBR2, HNPCC6 |
| type 6 (3) | |
| Colorectal cancer, somatic, 109800 (3) | FGFR3, ACH |
| Colorectal cancer, somatic, 114500 (3) | FLCN, BHD |
| Colorectal cancer, somatic, 114500 (3) | MLH3, HNPCC7 |
| Colorectal cancer, somatic (3) | BRAF |
| Colorectal cancer, somatic (3) | DLC1 |
| Colorectal cancer, sporadic, 114500 (3) | PLA2G2A, PLA2B, PLA2L, MOM1 |
| Colorectal cancer, susceptibility to (3) | CCND1, PRAD1, BCL1 |
| Colorectal cancer with chromosomal | BUB1 |
| instability (3) | |
| Combined C6/C7 deficiency (3) | C6 |
| Combined factor V and VIII deficiency, | LMAN1, ERGIC53, F5F8D, MCFD1 |
| 227300 (3) | |
| Combined hyperlipemia, familial (3) | LPL, LIPD |
| Combined immunodeficiency, X-linked, | IL2RG, SCIDX1, SCIDX, IMD4 |
| moderate, 312863 (3) | |
| Combined oxidative phosphorylation | GFM1, EFG1, GFM |
| deficiency, 609060 (3) | |
| Combined SAP deficiency (3) | PSAP, SAP1 |
| Complex I, mitochondrial respiratory chain, | NDUFS6 |
| deficiency of, 252010 (3) | |
| Complex V, mitochondrial respiratory chain, | ATPAF2, ATP12 |
| deficiency of, 604273 (3) | |
| Cone dystrophy-1, 304020 (3) | RPGR, RP3, CRD, RP15, COD1 |
| Cone dystrophy-3, 602093 (3) | GUCA1A, GCAP |
| Cone-rod dystrophy, 300029 (3) | RPGR, RP3, CRD, RP15, COD1 |
| Cone-rod dystrophy 3 (3) | ABCA4, ABCR, STGD1, FFM, RP19 |
| Cone-rod dystrophy (3) | AIPL1, LCA4 |
| Cone-rod dystrophy 6, 601777 (3) | GUCY2D, GUC2D, LCA1, CORD6 |
| Cone-rod dystrophy 9, 608194 (3) | RPGRIP1, LCA6, CORD9 |
| Cone-rod retinal dystrophy-2, 120970 (3) | CRX, CORD2, CRD |
| Congenital bilateral absence of vas | CFTR, ABCC7, CF, MRP7 |
| deferens, 277180 (3) | |
| Congenital cataracts, facial dysmorphism, | CTDP1, FCP1, CCFDN |
| and neuropathy, 604168 (3) | |
| Congenital disorder of glycosylation, type Ic, | ALG6 |
| 603147 (3) | |
| Congenital disorder of glycosylation, type Id, | ALG3, NOT56L, CDGS4 |
| 601110 (3) | |
| Congenital disorder of glycosylation, type Ie, | DPMI, MPDS, CDGIE |
| 608799 (3) | |
| Congenital disorder of glycosylation, type If, | MPDU1, SL15, CDGIF |
| 609180 (3) | |
| Congenital disorder of glycosylation, type Ig, | ALG12 |
| 607143 (3) | |
| Congenital disorder of glycosylation, type Ih, | ALG8 |
| 608104 (3) | |
| Congenital disorder of glycosylation, type Ii, | ALG2, CDGII |
| 607906 (3) | |
| Congenital disorder of glycosylation, type II, | DIBD1, ALG9 |
| 608776 (3) | |
| Congenital disorder of glycosylation, type | SLC35C1, FUCT1 |
| IIc, 266265 (3) | |
| Congenital disorder of glycosylation, type | B4GALT1, GGTB2, GT1, GTB |
| IId, 607091 (3) | |
| Congenital disorder of glycosylation, type | COG7, CDG2E |
| IIe, 608779 (3) | |
| Congenital disorder of glycosylation, type Ij, | DPAGT2, DGPT |
| 608093 (3) | |
| Congenital disorder of glycosylation, type Ik, | ALG1, HMAT1, HMT1 |
| 608540 (3) | |
| Congestive heart failure, susceptibility to (3) | ADRA2C, ADRA2L2 |
| Congestive heart failure, susceptibility to (3) | ADRB1, ADRB1R, RHR |
| Conjunctivitis, ligneous, 217090 (3) | PLG |
| Conotruncal anomaly face syndrome, | TBX1, DGS, CTHM, CAPS, TGA, |
| 217095 (3) | DORV, VCFS, DGCR |
| Contractural arachnodactyly, congenital (3) | FBN2, CCA |
| Convulsions, familial febrile, 4, 604352 (3) | MASS1, VLGR1, KIAA0686, FEB4, |
| | USH2C |
| COPD, rate of decline of lung function in, | MMP1, CLG |
| 606963 (3) | |
| Coproporphyria (3) | CPO |
| Corneal clouding, autosomal recessive (3) | APOA1 |
| Corneal dystrophy, Avellino type, 607541 | TGFBI, CSD2, CDGG1, CSD, BIGH3, |
| (3) | CDG2 |
| Corneal dystrophy, gelatinous drop-like, | TACSTD2, TROP2, M1S1 |
| 204870 (3) | |
| Corneal dystrophy, Groenouw type I, | TGFBI, CSD2, CDGG1, CSD, BIGH3, |
| 121900 (3) | CDG2 |
| Corneal dystrophy, hereditary polymorphous | VSX1, RINX, PPCD, PPD, KTCN |
| posterior, 122000 (3) | |
| Corneal dystrophy, hereditary polymorphous | COL8A2, FECD, PPCD2 |
| posterior, 2, 122000 (3) | |
| Corneal dystrophy, lattice type I, 122200 (3) | TGFBI, CSD2, CDGG1, CSD, BIGH3, |
| | CDG2 |
| Corneal dystrophy, lattice type IIIA, 608471 | TGFBI, CSD2, CDGG1, CSD, BIGH3, |
| (3) | CDG2 |
| Corneal dystrophy, Reis-Bucklers type, | TGFBI, CSD2, CDGG1, CSD, BIGH3, |
| 608470 (3) | CDG2 |
| Corneal dystrophy, Thiel-Behnke type, | TGFBI, CSD2, CDGG1, CSD, BIGH3, |
| 602082 (3) | CDG2 |
| Corneal fleck dystrophy, 121850 (3) | PIP5K3, CFD |
| Cornea plana congenita, recessive, 217300 | KERA, CNA2 |
| (3) | |
| Cornelia de Lange syndrome, 122470 (3) | NIPBL, CDLS |
| Coronary artery disease, autosomal | MEF2A, ADCAD1 |
| dominant, 1, 608320 (3) | |
| Coronary artery disease in familial | ABCA1, ABC1, HDLDT1, TGD |
| hypercholesterolemia, protection against, | |
| 143890 (3) | |
| Coronary artery disease, susceptibility to (3) | KL |
| Coronary artery disease, susceptibility to (3) | PON1, PON, ESA |
| Coronary artery disease, susceptibility to (3) | PON2 |
| Coronary artery spasm, susceptibility to (3) | PON1, PON, ESA |
| Coronary heart disease, susceptibility to (3) | MMP3, STMY1 |
| Coronary spasms, susceptibility to (3) | NOS3 |
| Corpus callosum, agenesis of, with mental | IGBP1 |
| retardation, ocular coloboma and | |
| micrognathia, 300472 (3) | |
| Cortisol resistance (3) | NR3C1, GCR, GRL |
| Cortisone reductase deficiency, 604931 (3) | GDH |
| Cortisone reductase deficiency, 604931 (3) | HSD11B1, HSD11, HSD11L |
| Costello syndrome, 218040 (3) | HRAS |
| Coumarin resistance, 122700 (3) | CYP2A6, CYP2A3, CYP2A, P450C2A |
| Cowden disease, 158350 (3) | PTEN, MMAC1 |
| Cowden-like syndrome, 158350 (3) | BMPR1A, ACVRLK3, ALK3 |
| CPT deficiency, hepatic, type IA, 255120 (3) | CPT1A |
| CPT deficiency, hepatic, type II, 600649 (3) | CPT2 |
| CPT II deficiency, lethal neonatal, 608836 | CPT2 |
| (3) | |
| Cramps, familial, potassium-aggravated (3) | SCN4A, HYPP, NAC1A |
| Craniofacial anomalies, empty sella turcica, | VSX1, RINX, PPCD, PPD, KTCN |
| corneal endothelial changes, and abnormal | |
| retinal and auditory bipolar cells (3) | |
| Craniofacial-deafness-hand syndrome, | PAX3, WS1, HUP2, CDHS |
| 122880 (3) | |
| Craniofacial-skeletal-dermatologic dysplasia | FGFR2, BEK, CFD1, JWS |
| (3) | |
| Craniofrontonasal dysplasia, 304110 (3) | EFNB1, EPLG2, CFNS, CFND |
| Craniometaphyseal dysplasia, 123000 (3) | ANKH, HANK, ANK, CMDJ, CCAL2, |
| | CPPDD |
| Craniosynostosis, nonspecific (3) | FGFR2, BEK, CFD1, JWS |
| Craniosynostosis, type 2, 604757 (3) | MSX2, CRS2, HOX8 |
| CRASH syndrome, 303350 (3) | L1CAM, CAML1, HSAS1 |
| Creatine deficiency syndrome, X-linked, | SLC6A8, CRTR |
| 300352 (3) | |
| Creatine phosphokinase, elevated serum, | CAV3, LGMD1C |
| 123320 (3) | |
| Creatine phosphokinase, elevated serum, | CAV3, LGMD1C |
| 123320 (3) | |
| Creutzfeldt-Jakob disease, 123400 (3) | PRNP, PRIP |
| Creutzfeldt-Jakob disease, variant, | HLA-DQB1 |
| resistance to, 123400 (3) | |
| Crigler-Najjar syndrome, type I, 218800 (3) | UGT1A1, UGT1, GNT1 |
| Crigler-Najjar syndrome, type II, 606785 (3) | UGT1A1, UGT1, GNT1 |
| Crohn disease, susceptibility to, 266600 (3) | CARD15, NOD2, IBD1, CD, ACUG, |
| | PSORAS1 |
| Crohn disease, susceptibility to, 266600 (3) | DLG5, PDLG, KIAA0583 |
| Crouzon syndrome, 123500 (3) | FGFR2, BEK, CFD1, JWS |
| Crouzon syndrome with acanthosis | FGFR3, ACH |
| nigricans (3) | |
| Cryptorchidism, bilateral, 219050 (3) | LGR8, GREAT |
| Cryptorchidism, idiopathic, 219050 (3) | INSL3 |
| Currarino syndrome, 176450 (3) | HLXB9, HOXHB9, SCRA1 |
| Cutis laxa, AD, 123700 (3) | ELN |
| Cutis laxa, autosomal dominant, 123700 (3) | FBLN5, ARMD3 |
| Cutis laxa, autosomal recessive, 219100 (3) | FBLN5, ARMD3 |
| Cutis laxa, neonatal (3) | ATP7A, MNK, MK, OHS |
| Cyclic ichthyosis with epidermolytic | KRT1 |
| hyperkeratosis, 607602 (3) | |
| Cylindromatosis, familial, 132700 (3) | CYLD1, CDMT, EAC |
| Cystathioninuria, 219500 (3) | CTH |
| Cystic fibrosis, 219700 (3) | CFTR, ABCC7, CF, MRP7 |
| Cystinosis, atypical nephropathic (3) | CTNS |
| Cystinosis, late-onset juvenile or adolescent | CTNS |
| nephropathic, 219900 (3) | |
| Cystinosis, nephropathic, 219800 (3) | CTNS |
| Cystinosis, ocular nonnephropathic, 219750 | CTNS |
| (3) | |
| Cystinuria, 220100 (3) | SLC3A1, ATR1, D2H, NBAT |
| Cystinuria, type II (3) | SLC7A9, CSNU3 |
| Cystinuria, type III (3) | SLC7A9, CSNU3 |
| D-2-hydroxyglutaric aciduria, 600721 (3) | D2HGD |
| Darier disease, 124200 (3) | ATP2A2, ATP2B, DAR |
| D-bifunctional protein deficiency, 261515 (3) | HSD17B4 |
| Deafness, autosomal dominant 10, 601316 | EYA4, DFNA10, CMD1J |
| (3) | |
| Deafness, autosomal dominant 1, 124900 | DIAPH1, DFNA1, LFHL1 |
| (3) | |
| Deafness, autosomal dominant 11, | MYO7A, USH1B, DFNB2, DFNA11 |
| neurosensory, 601317 (3) | |
| Deafness, autosomal dominant 12, 601842 | TECTA, DFNA8, DFNA12, DFNB21 |
| (3) | |
| Deafness, autosomal dominant 13, 601868 | COL11A2, STL3, DFNA13 |
| (3) | |
| Deafness, autosomal dominant 15, 602459 | POU4F3, BRN3C |
| (3) | |
| Deafness, autosomal dominant 17, 603622 | MYH9, MHA, FTNS, DFNA17 |
| (3) | |
| Deafness, autosomal dominant 20/26, | ACTG1, DFNA20, DFNA26 |
| 604717 (3) | |
| Deafness, autosomal dominant 22, 606346 | MYO6, DFNA22, DFNB37 |
| (3) | |
| Deafness, autosomal dominant 2, 600101 | GJB3, CX31, DFNA2 |
| (3) | |
| Deafness, autosomal dominant 2, 600101 | KCNQ4, DFNA2 |
| (3) | |
| Deafness, autosomal dominant 28, 608641 | TFCP2L3, DFNA28 |
| (3) | |
| Deafness, autosomal dominant 3, 601544 | GJB2, CX26, DFNB1, PPK, DFNA3, |
| (3) | KID, HID |
| Deafness, autosomal dominant 3, 601544 | GJB6, CX30, DFNA3, HED, ED2 |
| (3) | |
| Deafness, autosomal dominant 36, 606705 | TMC1, DFNB7, DFNB11, DFNA36 |
| (3) | |
| Deafness, autosomal dominant 36, with | DSPP, DPP, DGI1, DFNA39, DTDP2 |
| dentinogenesis, 605594 (3) | |
| Deafness, autosomal dominant 40 (3) | CRYM, DFNA40 |
| Deafness, autosomal dominant 4, 600652 | MYH14, KIAA2034, DFNA4 |
| (3) | |
| Deafness, autosomal dominant 5 (3) | DFNA5 |
| Deafness, autosomal dominant 8, 601543 | TECTA, DFNA8, DFNA12, DFNB21 |
| (3) | |
| Deafness, autosomal dominant 9, 601369 | COCH, DFNA9 |
| (3) | |
| Deafness, autosomal dominant | MYO1A |
| nonsyndromic sensorineural, 607841 (3) | |
| Deafness, autosomal dominant, with | GJB3, CX31, DFNA2 |
| peripheral neuropathy (3) | |
| Deafness, autosomal recessive 10, | TMPRSS3, ECHOS1, DFNB8, DFNB10 |
| congenital, 605316 (3) | |
| Deafness, autosomal recessive 1, 220290 | GJB2, CX26, DFNB1, PPK, DFNA3, |
| (3) | KID, HID |
| Deafness, autosomal recessive 12, 601386 | CDH23, USH1D |
| (3) | |
| Deafness, autosomal recessive 12, modifier | ATP2B2, PMCA2 |
| of, 601386 (3) | |
| Deafness, autosomal recessive 16, 603720 | STRC, DFNB16 |
| (3) | |
| Deafness, autosomal recessive 18, 602092 | USH1C, DFNB18 |
| (3) | |
| Deafness, autosomal recessive 21, 603629 | TECTA, DFNA8, DFNA12, DFNB21 |
| (3) | |
| Deafness, autosomal recessive 22, 607039 | OTOA, DFNB22 |
| (3) | |
| Deafness, autosomal recessive 23, 609533 | PCDH15, DFNB23 |
| (3) | |
| Deafness, autosomal recessive 29 (3) | CLDN14, DFNB29 |
| Deafness, autosomal recessive 2, | MYO7A, USH1B, DFNB2, DFNA11 |
| neurosensory, 600060 (3) | |
| Deafness, autosomal recessive 30, 607101 | MYO3A, DFNB30 |
| (3) | |
| Deafness, autosomal recessive 31, 607084 | WHRN, CIP98, KIAA1526, DFNB31 |
| (3) | |
| Deafness, autosomal recessive 3, 600316 | MYO15A, DFNB3 |
| (3) | |
| Deafness, autosomal recessive 36, 609006 | ESPN |
| (3) | |
| Deafness, autosomal recessive 37, 607821 | MYO6, DFNA22, DFNB37 |
| (3) | |
| Deafness, autosomal recessive (3) | GJB3, CX31, DFNA2 |
| Deafness, autosomal recessive 4, 600791 | SLC26A4, PDS, DFNB4 |
| (3) | |
| Deafness, autosomal recessive 61 (3) | PRES, DFNB61, SLC26A5 |
| Deafness, autosomal recessive 6, 600971 | TMIE, DFNB6 |
| (3) | |
| Deafness, autosomal recessive 7, 600974 | TMC1, DFNB7, DFNB11, DFNA36 |
| (3) | |
| Deafness, autosomal recessive 8, childhood | TMPRSS3, ECHOS1, DFNB8, DFNB10 |
| onset, 601072 (3) | |
| Deafness, autosomal recessive 9, 601071 | OTOF, DFNB9, NSRD9 |
| (3) | |
| Deafness, congenital heart defects, and | JAG1, AGS, AHD |
| posterior embryotoxon (3) | |
| Deafness, nonsyndromic (3) ( ) | KIAA1199 |
| Deafness, nonsyndromic neurosensory, | GJB6, CX30, DFNA3, HED, ED2 |
| digenic (3) | |
| Deafness, sensorineural, with hypertrophic | MYO6, DFNA22, DFNB37 |
| cardiomyopathy, 606346 (3) | |
| Deafness, X-linked 1, progressive (3) | TIMM8A, DFN1, DDP, MTS, DDP1 |
| Deafness, X-linked 3, conductive, with | POU3F4, DFN3 |
| stapes fixation, 304400 (3) | |
| Debrisoquine sensitivity (3) | CYP2D@, CYP2D, P450C2D |
| Dejerine-Sottas disease, 145900 (3) | PMP22, CMT1A, CMT1E, DSS |
| Dejerine-Sottas neuropathy, 145900 (3) | EGR2, KROX20 |
| Dejerine-Sottas neuropathy, autosomal | PRX, CMT4F |
| recessive, 145900 (3) | |
| Dejerine-Sottas syndrome, 145900 (3) | MPZ, CMT1B, CMTDI3, CHM, DSS |
| Delayed sleep phase syndrome, | AANAT, SNAT |
| susceptibility to (3) | |
| Dementia, familial British, 176500 (3) | ITM2B, BRI, ABRI, FBD |
| Dementia, familial Danish, 117300 (3) | ITM2B, BRI, ABRI, FBD |
| Dementia, frontotemporal, 600274 (3) | PSEN1, AD3 |
| Dementia, frontotemporal, with | MAPI, MTBT1, DDPAC, MSTD |
| parkinsonism, 600274 (3) | |
| Dementia, Lewy body, 127750 (3) | SNCA, NACP, PARK1, PARK4 |
| Dementia, Lewy body, 127750 (3) | SNCB |
| Dementia, Pick disease-like, 172700 (3) | MAPI, MTBT1, DDPAC, MSTD |
| Dementia, vascular, susceptibility to (3) | TNF, TNFA |
| Dengue fever, protection against (3) | CD209, CDSIGN |
| Dental anomalies, isolated (3) | RUNX2, CBFA1, PEBP2A1, AML3 |
| Dentatorubro-pallidoluysian atrophy, 125370 | DRPLA |
| (3) | |
| Dent disease, 300009 (3) | CLCN5, CLCK2, NPHL2, DENTS |
| Dentin dysplasia, type II, 125420 (3) | DSPP, DPP, DGI1, DFNA39, DTDP2 |
| Dentinogenesis imperfecta, Shields type II, | DSPP, DPP, DGI1, DFNA39, DTDP2 |
| 125490 (3) | |
| Dentinogenesis imperfecta, Shields type III, | DSPP, DPP, DGI1, DFNA39, DTDP2 |
| 125500 (3) | |
| Dent syndrome, 300009 (3) | OCRL, LOCR, OCRL1, NPHL2 |
| Denys-Drash syndrome, 194080 (3) | WT1 |
| Dermatofibrosarcoma protuberans (3) | PDGFB, SIS |
| De Sanctis-Cacchione syndrome, 278800 | ERCC6, CKN2, COFS, CSB |
| (3) | |
| Desmoid disease, hereditary, 135290 (3) | APC, GS, FPC |
| Desmosterolosis, 602398 (3) | DHCR24, KIAA0018 |
| Diabetes insipidus, nephrogenic, 304800 (3) | AVPR2, DIR, DI1, ADHR |
| Diabetes insipidus, nephrogenic, autosomal | AQP2 |
| dominant, 125800 (3) | |
| Diabetes insipidus, nephrogenic, autosomal | AQP2 |
| recessive, 222000 (3) | |
| Diabetes insipidus, neurohypophyseal, | AVP, AVRP, VP |
| 125700 (3) | |
| Diabetes mellitus, 125853 (3) | ABCC8, SUR, PHHI, SUR1 |
| Diabetes mellitus, insulin-dependent, | TCF1, HNF1A, MODY3 |
| 222100 (3) | |
| Diabetes mellitus, insulin-dependent, 5, | SUMO4, IDDM5 |
| 600320 (3) | |
| Diabetes mellitus, insulin-dependent, | PTPN8, PEP, PTPN22, LYP |
| susceptibility to, 222100 (3) | |
| Diabetes mellitus, insulin-resistant, with | INSR |
| acanthosis nigricans (3) | |
| Diabetes mellitus, insulin-resistant, with | PPARG, PPARG1, PPARG2 |
| acanthosis nigricans and hypertension, | |
| 604367 (3) | |
| Diabetes mellitus, neonatal-onset, 606176 | GCK |
| (3) | |
| Diabetes mellitus, noninsulin-dependent, | GCGR |
| 125853 (3) | |
| Diabetes mellitus, noninsulin-dependent, | GPD2 |
| 125853 (3) | |
| Diabetes mellitus, noninsulin-dependent, | HNF4A, TCF14, MODY1 |
| 125853 (3) | |
| Diabetes mellitus, noninsulin-dependent, | IRS2 |
| 125853 (3) | |
| Diabetes mellitus, noninsulin-dependent, | MAPK8IP1, IB1 |
| 125853 (3) | |
| Diabetes mellitus, noninsulin-dependent, | NEUROD1, NIDDM |
| 125853 (3) | |
| Diabetes mellitus, noninsulin-dependent, | TCF2, HNF2 |
| 125853 (3) | |
| Diabetes mellitus, noninsulin-dependent, 2, | TCF1, HNF1A, MODY3 |
| 125853 (3) | |
| Diabetes mellitus, noninsulin-dependent (3) | IRS1 |
| Diabetes mellitus, noninsulin-dependent (3) | SLC2A2, GLUT2 |
| Diabetes mellitus, noninsulin-dependent (3) | SLC2A4, GLUT4 |
| Diabetes mellitus, noninsulin-dependent, | CAPN10 |
| 601283 (3) | |
| Diabetes mellitus, non-insulin-dependent, | ENPP1, PDNP1, NPPS, M6S1, PCA1 |
| susceptibility to, 125853 (3) | |
| Diabetes mellitus, noninsulin-dependent, | RETN, RSTN, FIZZ3 |
| susceptibility to, 125853 (3) | |
| Diabetes mellitus, permanent neonatal, with | PTF1A |
| cerebellar agenesis, 609069 (3) | |
| Diabetes mellitus, permanent neonatal, with | KCNJ11, BIR, PHHI |
| neurologic features, 606176 (3) | |
| Diabetes mellitus, type II, 125853 (3) | AKT2 |
| Diabetes mellitus, type II, susceptibility to, | IPF1 |
| 125853 (3) | |
| Diabetes mellitus, type I, susceptibility to, | FOXP3, IPEX, AIID, XPID, PIDX |
| 222100 (3) | |
| Diabetes, permanent neonatal, 606176 (3) | KCNJ11, BIR, PHHI |
| Diabetic nephropathy, susceptibility to, | ACE, DCP1, ACE1 |
| 603933 (3) | |
| Diabetic retinopathy, NIDDM-related, | VEGF |
| susceptibility to, 125853 (3) | |
| Diastrophic dysplasia, 222600 (3) | SLC26A2, DTD, DTDST, D5S1708, |
| | EDM4 |
| Diastrophic dysplasia, broad bone- | SLC26A2, DTD, DTDST, D5S1708, |
| platyspondylic variant (3) | EDM4 |
| DiGeorge syndrome, 188400 (3) | TBX1, DGS, CTHM, CAFS, TGA, |
| | DORV, VCFS, DGCR |
| Dihydropyrimidinuria (3) | DPYS, DHP |
| Dilated cardiomyopathy with woolly hair and | DSP, KPPS2, PPKS2 |
| keratoderma, 605676 (3) | |
| Dimethylglycine dehydrogenase deficiency, | DMGDH, DMGDHD |
| 605850 (3) | |
| Disordered steroidogenesis, isolated (3) | POR |
| Dissection of cervical arteries (3) | COL1A1 |
| DNA ligase I deficiency (3) | LIG1 |
| DNA topoisomerase I, camptothecin- | TOP1 |
| resistant (3) | |
| DNA topoisomerase II, resistance to | TOP2A, TOP2 |
| inhibition of, by amsacrine (3) | |
| Dopamine-beta-hydroxylase activity levels, | DBH |
| plasma (3) | |
| Dopamine beta-hydroxylase deficiency, | DBH |
| 223360 (3) | |
| Dosage-sensitive sex reversal, 300018 (3) | DAX1, AHC, AHX, NROB1 |
| Double-outlet right ventricle, 217095 (3) | CFC1, CRYPTIC, HTX2 |
| Down syndrome, risk of, 190685 (3) | MTR |
| Doyne honeycomb degeneration of retina, | EFEMP1, FBNL, DHRD |
| 126600 (3) | |
| Drug addiction, susceptibility to (3) | FAAH |
| Duane-radial ray syndrome, 607323 (3) | SALL4, HSAL4 |
| Dubin-Johnson syndrome, 237500 (3) | ABCC2, CMOAT |
| Duchenne muscular dystrophy, 310200 (3) | DMD, BMD |
| Dyggve-Melchior-Clausen disease, 223800 | DYM, FLJ90130, DMC, SMC |
| (3) | |
| Dysalbuminemic hyperthyroxinemia (3) | ALB |
| Dysautonomia, familial, 223900 (3) | IKBKAP, IKAP |
| Dyschromatosis symmetrica hereditaria, | ADAR, DRADA, DSH, DSRAD |
| 127400 (3) | |
| Dyserythropoietic anemia with | GATA1, GF1, ERYF1, NFE1 |
| thrombocytopenia, 300367 (3) | |
| Dysfibrinogenemia, alpha type, causing | FGA |
| bleeding diathesis (3) | |
| Dysfibrinogenemia, alpha type, causing | FGA |
| recurrent thrombosis (3) | |
| Dysfibrinogenemia, beta type (3) | FGB |
| Dysfibrinogenemia, gamma type (3) | FGG |
| Dyskeratosis congenita-1, 305000 (3) | DKC1, DKC |
| Dyskeratosis congenita, autosomal | TERC, TRC3, TR |
| dominant, 127550 (3) | |
| Dyslexia, susceptibility to, 1, 127700 (3) | DYX1C1, DYXC1, DYX1 |
| Dyslexia, susceptibility to, 2, 600202 (3) | KIAA0319, DYX2, DYLX2, DLX2 |
| Dysprothrombinemia (3) | F2 |
| Dyssegmental dysplasia, Silverman- | HSPG2, PLC, SJS, SJA, SJS1 |
| Handmaker type, 224410 (3) | |
| Dystonia-12, 128235 (3) | ATP1A3, DYT12, RDP |
| Dystonia-1, torsion, 128100 (3) | DYT1, TOR1A |
| Dystonia, DOPA-responsive, 128230 (3) | GCH1, DYT5 |
| Dystonia, early-onset atypical, with | DYT1, TOR1A |
| myoclonic features (3) | |
| Dystonia, myoclonic, 159900 (3) | DRD2 |
| Dystonia, myoclonic, 159900 (3) | SGCE, DYT11 |
| Dystonia, primary cervical (3) | DRD5, DRD1B, DRD1L2 |
| Dystransthyretinemic hyperthyroxinemia(3) | TTR, PALB |
| EBD, Bart type, 132000 (3) | COL7A1 |
| EBD, localisata variant (3) | COL7A1 |
| Ectodermal dysplasia-1, anhidrotic, 305100 | ED1, EDA, HED |
| (3) | |
| Ectodermal dysplasia 2, hidrotic, 129500 (3) | GJB6, CX30, DFNA3, HED, ED2 |
| Ectodermal dysplasia, anhidrotic, 224900 | EDARADD |
| (3) | |
| Ectodermal dysplasia, anhidrotic, | IKBKG, NEMO, FIP3, IP2 |
| lymphedema and immunodeficiency, 300301 | |
| (3) | |
| Ectodermal dysplasia, anhidrotic, with T-cell | NFKBIA, IKBA |
| immunodeficiency (3) | |
| Ectodermal dysplasia, hypohidrotic, | EDAR, DL, ED3, EDA3 |
| autosomal dominant, 129490 (3) | |
| Ectodermal dysplasia, hypohidrotic, | EDAR, DL, ED3, EDA3 |
| autosomal recessive, 224900 (3) | |
| Ectodermal dysplasia, hypohidrotic, with | IKBKG, NEMO, FIP3, IP2 |
| immune deficiency, 300291 (3) | |
| Ectodermal dysplasia, Margarita Island type, | HVEC, PVRL1, PVRR1, PRR1 |
| 225060 (3) | |
| Ectodermal dysplasia/skin fragility | PKP1 |
| syndrome, 604536 (3) | |
| Ectopia lentis, familial, 129600 (3) | FBN1, MFS1, WMS |
| Ectopia pupillae, 129750 (3) | PAX6, AN2, MGDA |
| Ectrodactyly, ectodermal dysplasia, and | TP73L, TP63, KET, EEC3, SHFM4, |
| cleft lip/palate syndrome 3, 604292 (3) | LMS, RHS |
| Ehlers-Danlos due to tenascin X deficiency, | TNXB, TNX, TNXB1, TNXBS, TNXB2 |
| 606408 (3) | |
| Ehlers-Danlos syndrome, hypermobility | TNXB, TNX, TNXB1, TNXBS, TNXB2 |
| type, 130020 (3) | |
| Ehlers-Danlos syndrome, progeroid form, | B4GALT7, XGALT1, XGPT1 |
| 130070 (3) | |
| Ehlers-Danlos syndrome, type I, 130000 (3) | COL1A1 |
| Ehlers-Danlos syndrome, type I, 130000 (3) | COL5A1 |
| Ehlers-Danlos syndrome, type I, 130000 (3) | COL5A2 |
| Ehlers-Danlos syndrome, type II, 130010 (3) | COL5A1 |
| Ehlers-Danlos syndrome, type III, 130020 | COL3A1 |
| (3) | |
| Ehlers-Danlos syndrome, type IV, 130050 | COL3A1 |
| (3) | |
| Ehlers-Danlos syndrome, type VI, 225400 | PLOD, PLOD1 |
| (3) | |
| Ehlers-Danlos syndrome, type VII, 130060 | COL1A1 |
| (3) | |
| Ehlers-Danlos syndrome, type VIIA2, | COL1A2 |
| 130060 (3) | |
| Ehlers-Danlos syndrome, type VIIC, 225410 | ADAMTS2, NPI |
| (3) | |
| Elite sprint athletic performance (3) | ACTN3 |
| Elliptocytosis-1 (3) | EPB41, EL1 |
| Elliptocytosis-2 (3) | SPTA1 |
| Elliptocytosis-3 (3) | SPTB |
| Elliptocytosis, Malaysian-Melanesian type | SLC4A1, AE1, EPB3 |
| (3) | |
| Ellis-van Creveld syndrome, 225500 (3) | EVC |
| Ellis-van Creveld syndrome, 225500 (3) | LBN, EVC2 |
| Emery-Dreifuss muscular dystrophy, | EMD, EDMD, STA |
| 310300 (3) | |
| Emery-Dreifuss muscular dystrophy, AD, | LMNA, LMN1, EMD2, FPLD, CMD1A, |
| 181350 (3) | HGPS, LGMD1B |
| Emery-Dreifuss muscular dystrophy, AR, | LMNA, LMN1, EMD2, FPLD, CMD1A, |
| 604929 (3) | HGPS, LGMD1B |
| Emphysema (3) | PI, AAT |
| Emphysema-cirrhosis (3) | PI, AAT |
| Encephalopathy, familial, with neuroserpin | SERPINI1, PI12 |
| inclusion bodies, 604218 (3) | |
| Encephalopathy, progressive mitochondrial, | COX10 |
| with proximal renal tubulopathy due to | |
| cytochrome c oxidase deficiency (3) | |
| Enchondromatosis, Oilier type, 166000 (3) | PTHR1, PTHR |
| Endometrial carcinoma (3) | CDH1, UVO |
| Endometrial carcinoma (3) | MSH3 |
| Endometrial carcinoma (3) | MSH6, GTBP, HNPCC5 |
| Endometrial carcinoma (3) | PTEN, MMAC1 |
| Endotoxin hyporesponsiveness (3) | TLR4 |
| Endplate acetylcholinesterase deficiency, | COLQ, EAD |
| 603034 (3) | |
| Enhanced S-cone syndrome, 268100 (3) | NR2E3, PNR, ESCS |
| Enlarged vestibular aqueduct, 603545 (3) | SLC26A4, PDS, DFNB4 |
| Enolase-beta deficiency (3) | ENO3 |
| Enterokinase deficiency, 226200 (3) | PRSS7, ENTK |
| Eosinophil peroxidase deficiency, 261500 | EPX |
| (3) | |
| Epidermodysplasia verruciformis, 226400 | EVER1, EV1 |
| (3) | |
| Epidermodysplasia verruciformis, 226400 | EVER2, EV2 |
| (3) | |
| Epidermolysis bullosa dystrophica, AD, | COL7A1 |
| 131750 (3) | |
| Epidermolysis bullosa dystrophica, AR, | COL7A1 |
| 226600 (3) | |
| Epidermolysis bullosa, generalized atrophic | COL17A1, BPAG2 |
| benign, 226650 (3) | |
| Epidermolysis bullosa, generalized atrophic | ITGB4 |
| benign, 226650 (3) | |
| Epidermolysis bullosa, generalized atrophic | LAMA3, LOCS |
| benign, 226650 (3) | |
| Epidermolysis bullosa, generalized atrophic | LAMB3 |
| benign, 226650 (3) | |
| Epidermolysis bullosa, generalized atrophic | LAMC2, LAMNB2, LAMB2T |
| benign, 226650 (3) | |
| Epidermolysis bullosa, Herlitz junctional | LAMB3 |
| type, 226700 (3) | |
| Epidermolysis bullosa, Herlitz junctional | LAMC2, LAMNB2, LAMB2T |
| type, 226700 (3) | |
| Epidermolysis bullosa, junctional, Herlitz | LAMA3, LOCS |
| type, 226700 (3) | |
| Epidermolysis bullosa, junctional, with | ITGB4 |
| pyloric atresia, 226730 (3) | |
| Epidermolysis bullosa, junctional, with | ITGA6 |
| pyloric stenosis, 226730 (3) | |
| Epidermolysis bullosa, lethal acantholytic, | DSP, KPPS2, PPKS2 |
| 609638 (3) | |
| Epidermolysis bullosa of hands and feet, | ITGB4 |
| 131800 (3) | |
| Epidermolysis bullosa, pretibial, 131850 (3) | COL7A1 |
| Epidermolysis bullosa pruriginosa, 604129 | COL7A1 |
| (3) | |
| Epidermolysis bullosa simplex, Koebner, | KRT14 |
| Dowling-Meara, and Weber-Cockayne types, | |
| 131900, 131760, 131800 (3) | |
| Epidermolysis bullosa simplex, Koebner, | KRT5 |
| Dowling-Meara, and Weber-Cockayne types, | |
| 131900, 131760, 131800 (3) | |
| Epidermolysis bullosa simplex, Ogna type, | PLEC1, PLTN, EBS1 |
| 131950 (3) | |
| Epidermolysis bullosa simplex, recessive, | KRT14 |
| 601001 (3) | |
| Epidermolysis bullosa simplex with mottled | KRT5 |
| pigmentation, 131960 (3) | |
| Epidermolytic hyperkeratosis, 113800 (3) | KRT10 |
| Epidermolytic hyperkeratosis, 113800 (3) | KRT1 |
| Epidermolytic palmoplantar keratoderma, | KRT9, EPPK |
| 144200 (3) | |
| Epilepsy, benign, neonatal, type 1, 121200 | KCNQ2, EBN1 |
| (3) | |
| Epilepsy, benign neonatal, type 2, 121201 | KCNQ3, EBN2, BFNC2 |
| (3) | |
| Epilepsy, childhood absence, 607681 (3) | GABRG2, GEFSP3, CAE2, ECA2 |
| Epilepsy, childhood absence, 607682 (3) | CLCN2, EGMA, ECA3, EGI3 |
| Epilepsy, childhood absence, evolving to | JRK, JH8 |
| juvenile myoclonic epilepsy (3) | |
| Epilepsy, generalized idiopathic, 600669 (3) | CACNB4, EJM |
| Epilepsy, generalized, with febrile seizures | GABRG2, GEFSP3, CAE2, ECA2 |
| plus, 604233 (3) | |
| Epilepsy, generalized, with febrile seizures | SCN1A, GEFSP2, SMEI |
| plus, type 2, 604233 (3) | |
| Epilepsy, idopathic generalized, | ME2 |
| susceptibility to, 600669 (3) | |
| Epilepsy, juvenile absence, 607631 (3) | CLCN2, EGMA, ECA3, EGI3 |
| Epilepsy, juvenile myoclonic, 606904 (3) | CACNB4, EJM |
| Epilepsy, juvenile myoclonic, 606904 (3) | CLCN2, EGMA, ECA3, EGI3 |
| Epilepsy, juvenile myoclonic, 606904 (3) | GABRA1, EJM |
| Epilepsy, myoclonic, Lafora type, 254780 | EPM2A, MELF, EPM2 |
| (3) | |
| Epilepsy, myoclonic, Lafora type, 254780 | NHLRC1, EPM2A, EPM2B |
| (3) | |
| Epilepsy, neonatal myoclonic, with | SLC25A22, GC1 |
| suppression-burst pattern, 609304 (3) | |
| Epilepsy, nocturnal frontal lobe, 1, 600513 | CHRNA4, ENFL1 |
| (3) | |
| Epilepsy, nocturnal frontal lobe, 3, 605375 | CHRNB2, EFNL3 |
| (3) | |
| Epilepsy, partial, with auditory features, | LGI1, EPT, ETL1 |
| 600512 (3) | |
| Epilepsy, progressive myoclonic 1, 254800 | CSTB, STFB, EPM1 |
| (3) | |
| Epilepsy, progressive myoclonic 2B, 254780 | NHLRC1, EPM2A, EPM2B |
| (3) | |
| Epilepsy, severe myoclonic, of infancy, | SCN1A, GEFSP2, SMEI |
| 607208 (3) | |
| Epilepsy with grand mal seizures on | CLCN2, EGMA, ECA3, EGI3 |
| awakening, 607628 (3) | |
| Epilepsy, X-linked, with variable learning | SYN1 |
| disabilities and behavior disorders, 300491 | |
| (3) | |
| Epiphyseal dysplasia, multiple 1, 132400 (3) | COMP, EDM1, MED, PSACH |
| Epiphyseal dysplasia, multiple, 226900 (3) | SLC26A2, DTD, DTDST, D5S1708, |
| | EDM4 |
| Epiphyseal dysplasia, multiple, 3, 600969 | COL9A3, EDM3, IDD |
| (3) | |
| Epiphyseal dysplasia, multiple, 5, 607078 | MATN3, EDM5, HOA |
| (3) | |
| Epiphyseal dysplasia, multiple, COL9A1- | COL9A1, MED |
| related (3) | |
| Epiphyseal dysplasia, multiple, type 2, | COL9A2, EDM2 |
| 600204 (3) | |
| Epiphyseal dysplasia, multiple, with | COL9A3, EDM3, IDD |
| myopathy (3) | |
| Episodic ataxia/myokymia syndrome, | KCNA1, AEMK, EA1 |
| 160120 (3) | |
| Episodic ataxia, type 2, 108500 (3) | CACNA1A, CACNL1A4, SCA6 |
| Epithelial ovarian cancer, somatic, 604370 | OPCML |
| (3) | |
| Epstein syndrome, 153650 (3) | MYH9, MHA, FTNS, DFNA17 |
| Erythermalgia, primary, 133020 (3) | SCN9A, NENA, PN1 |
| Erythremias, alpha-(3) | HBA1 |
| Erythremias, beta-(3) | HBB |
| Erythrocytosis (3) | HBA2 |
| Erythrocytosis, familial, 133100 (3) | EPOR |
| Erythrokeratoderma, progressive symmetric, | LOR |
| 602036 (3) | |
| Erythrokeratodermia variabilis, 133200 (3) | GJB3, CX31, DFNA2 |
| Erythrokeratodermia variabilis with | GJB4, CX30.3 |
| erythema gyratum repens, 133200 (3) | |
| Esophageal cancer, 133239 (3) | TGFBR2, HNPCC6 |
| Esophageal carcinoma, somatic, 133239 (3) | RNF6 |
| Esophageal squamous cell carcinoma, | LZTS1, F37, FEZ1 |
| 133239 (3) | |
| Esophageal squamous cell carcinoma, | WWOX, FOR |
| 133239 (3) | |
| Estrogen resistance (3) | ESR1, ESR |
| Ethylmalonic encephalopathy, 602473 (3) | ETHE1, HSCO, D83198 |
| Ewing sarcoma (3) | EWSR1 , EWS |
| Exertional myoglobinuria due to deficiency | LDHA, LDH1 |
| of LDH-A (3) | |
| Exostoses, multiple, type 1, 133700 (3) | EXT1 |
| Exostoses, multiple, type 2, 133701 (3) | EXT2 |
| Exudative vitreoretinopathy, 133780 (3) | FZD4, EVR1 |
| Exudative vitreoretinopathy, dominant, | LRP5, BMND1, LRP7, LR3, OPPG, |
| 133780 (3) | VBCH2 |
| Exudative vitreoretinopathy, recessive, | LRP5, BMND1, LRP7, LR3, OPPG, |
| 601813 (3) | VBCH2 |
| Exudative vitreoretinopathy, X-linked, | NDP, ND |
| 305390 (3) | |
| Eye anomalies, multiplex (3) | PAX6, AN2, MGDA |
| Ezetimibe, nonresponse to (3) | NPC1L1 |
| Fabry disease (3) | GLA |
| Facioscapulohumeral muscular dystrophy- | FSHMD1A, FSHD1A |
| 1A (3) | |
| Factor H and factor H-like 1 (3) | HF1, CFH, HUS |
| Factor V and factor VIII, combined | MCFD2 |
| deficiency of, 227300 (3) | |
| Factor VII deficiency (3) | F7 |
| Factor X deficiency (3) | F10 |
| Factor XI deficiency, autosomal dominant | F11 |
| (3) | |
| Factor XI deficiency, autosomal recessive | F11 |
| (3) | |
| Factor XII deficiency (3) | F12, HAF |
| Factor XIIIA deficiency (3) | F13A1, F13A |
| Factor XIIIB deficiency (3) | F13B |
| Familial Mediterranean fever, 249100 (3) | MEFV, MEF, FMF |
| Fanconi anemia, complementation group A, | FANCA, FACA, FA1, FA, FAA |
| 227650 (3) | |
| Fanconi anemia, complementation group B, | FAAP95, FAAP90, FLJ34064, FANCB |
| 300514 (3) | |
| Fanconi anemia, complementation group C | FANCC, FACC |
| (3) | |
| Fanconi anemia, complementation group | BRCA2, FANCD1 |
| D1, 605724 (3) | |
| Fanconi anemia, complementation group D2 | FANCD2, FANCD, FACD, FAD |
| (3) | |
| Fanconi anemia, complementation group E | FANCE, FACE |
| (3) | |
| Fanconi anemia, complementation group F | FANCF |
| (3) | |
| Fanconi anemia, complementation group G | XRCC9, FANCG |
| (3) | |
| Fanconi anemia, complementation group J, | BRIP1, BACH1, FANCJ |
| 609054 (3) | |
| Fanconi anemia, complementation group L | PHF9, FANCL |
| (3) | |
| Fanconi anemia, complementation group M | FANCM, KIAA1596 |
| (3) | |
| Fanconi-Bickel syndrome, 227810 (3) | SLC2A2, GLUT2 |
| Farber lipogranulomatosis (3) | ASAH, AC |
| Fatty liver, acute, of pregnancy (3) | HADHA, MTPA |
| Favism (3) | G6PD, G6PD1 |
| Fechtner syndrome, 153640 (3) | MYH9, MHA, FTNS, DFNA17 |
| Feingold syndrome, 164280 (3) | MYCN, NMYC, ODED, MODED |
| Fertile eunuch syndrome, 228300 (3) | GNRHR, LHRHR |
| Fibrocalculous pancreatic diabetes, | SPINK1, PSTI, PCTT, TATI |
| susceptibility to (3) | |
| Fibromatosis, gingival, 135300 (3) | SOS1, GINGF, GF1, HGF |
| Fibromatosis, juvenile hyaline, 228600 (3) | ANTXR2, CMG2, JHF, ISH |
| Fibrosis of extraocular muscles, congenital, | KIF21A, KIAA1708, FEOM1, CFEOM1 |
| 1, 135700 (3) | |
| Fibrosis of extraocular muscles, congenital, | PHOX2A, ARIX, CFEOM2 |
| 2, 602078 (3) | |
| Fibular hypoplasia and complex | GDF5, CDMP1 |
| brachydactyly, 228900 (3) | |
| Fish-eye disease, 136120 (3) | LCAT |
| Fish-odor syndrome, 602079 (3) | FMO3 |
| Fitzgerald factor deficiency (3) | KNG |
| Fluorouracil toxicity, sensitivity to (3) | DPYD, DPD |
| Focal cortical dysplasia, Taylor balloon cell | TSC1, LAM |
| type, 607341 (3) | |
| Follicle-stimulating hormone deficiency, | FSHB |
| isolated, 229070 (3) | |
| Forebrain defects (3) | TDGF1 |
| Foveal hypoplasia, isolated, 136520 (3) | PAX6, AN2, MGDA |
| Foveomacular dystrophy, adult-onset, with | RDS, RP7, PRPH2, PRPH, AVMD, |
| choroidal neovascularization, 608161 (3) | AOFMD |
| Fragile X syndrome (3) | FMR1, FRAXA |
| Fraser syndrome, 219000 (3) | FRAS1 |
| Fraser syndrome, 219000 (3) | FREM2 |
| Frasier syndrome, 136680 (3) | WT1 |
| Friedreich ataxia, 229300 (3) | FRDA, FARR |
| Friedreich ataxia with retained reflexes, | FRDA, FARR |
| 229300 (3) | |
| Frontometaphyseal dysplasia, 304120 (3) | FLNA, FLN1, ABPX, NHBP, OPD1, |
| | OPD2, FMD, MNS |
| Fructose-bisphosphatase deficiency (3) | FBP1 |
| Fructose intolerance (3) | ALDOB |
| Fructosuria (3) | KHK |
| Fuchs endothelial corneal dystrophy, | COL8A2, FECD, PPCD2 |
| 136800 (3) | |
| Fucosidosis (3) | FUCA1 |
| Fucosyltransferase-6 deficiency (3) | FUT6 |
| Fumarase deficiency, 606812 (3) | FH |
| Fundus albipunctatus, 136880 (3) | RDH5 |
| Fundus albipunctatus, 136880 (3) | RLBP1 |
| Fundus flavimaculatus, 248200 (3) | ABCA4, ABCR, STGD1, FFM, RP19 |
| G6PD deficiency (3) | G6PD, G6PD1 |
| GABA-transaminase deficiency (3) | ABAT, GABAT |
| Galactokinase deficiency with cataracts, | GALK1 |
| 230200 (3) | |
| Galactose epimerase deficiency, 230350 (3) | GALE |
| Galactosemia, 230400 (3) | GALT |
| Galactosialidosis (3) | PPGB, GSL, NGBE, GLB2, CTSA |
| GAMT deficiency (3) | GAMT |
| Gardner syndrome (3) | APC, GS, FPC |
| Gastric cancer, 137215 (3) | APC, GS, FPC |
| Gastric cancer, 137215 (3) | IRF1, MAR |
| Gastric cancer, familial diffuse, 137215 (3) | CDH1, UVO |
| Gastric cancer risk after H. pylori infection, | IL1B |
| 137215 (3) | |
| Gastric cancer risk after H. pylori infection, | IL1RN |
| 137215 (3) | |
| Gastric cancer, somatic, 137215 (3) | CASP10, MCH4, ALPS2 |
| Gastric cancer, somatic, 137215 (3) | ERBB2, NGL, NEU, HER2 |
| Gastric cancer, somatic, 137215 (3) | FGFR2, BEK, CFD1, JWS |
| Gastric cancer, somatic, 137215 (3) | KLF6, COPEB, BCD1, ZF9 |
| Gastric cancer, somatic, 137215 (3) | MUTYH |
| Gastrointestinal stromal tumor, somatic, | KIT, PBT |
| 606764 (3) | |
| Gastrointestinal stromal tumor, somatic, | PDGFRA |
| 606764 (3) | |
| Gaucher disease, 230800 (3) | GBA |
| Gaucher disease, variant form (3) | PSAP, SAP1 |
| Gaucher disease with cardiovascular | GBA |
| calcification, 231005 (3) | |
| Gaze palsy, horizontal, with progressive | ROBO3, RBIG1, RIG1, HGPPS |
| scoliosis, 607313 (3) | |
| Generalized epilepsy and paroxysmal | KCNMA1, SLO |
| dyskinesia, 609446 (3) | |
| Generalized epilepsy with febrile seizures | SCN1B, GEFSP1 |
| plus, 604233 (3) | |
| Germ cell tumor (3) | BCL10 |
| Germ cell tumors, 273300 (3) | KIT, PBT |
| Gerstmann-Straussler disease, 137440 (3) | PRNP, PRIP |
| Giant axonal neuropathy-1, 256850 (3) | GAN, GAN1 |
| Giant-cell fibroblastoma (3) | PDGFB, SIS |
| Giant cell hepatitis, neonatal, 231100 (3) | CYP7B1 |
| Giant platelet disorder, isolated (3) | GP1BB |
| Gilbert syndrome, 143500 (3) | UGT1A1, UGT1, GNT1 |
| Gitelman syndrome, 263800 (3) | SLC12A3, NCCT, TSC |
| Glanzmann thrombasthenia, type A, 273800 | ITGA2B, GP2B, CD41B |
| (3) | |
| Glanzmann thrombasthenia, type B (3) | ITGB3, GP3A |
| Glaucoma 1A, primary open angle, juvenile- | MYOC, TIGR, GLC1A, JOAG, GPOA |
| onset, 137750 (3) | |
| Glaucoma 1A, primary open angle, | MYOC, TIGR, GLC1A, JOAG, GPOA |
| recessive (3) | |
| Glaucoma 1E, primary open angle, adult- | OPTN, GLC1E, FIP2, HYPL, NRP |
| onset, 137760 (3) | |
| Glaucoma 3A, primary congenital, 231300 | CYP1B1, GLC3A |
| (3) | |
| Glaucoma, early-onset, digenic (3) | CYP1B1, GLC3A |
| Glaucoma, early-onset, digenic (3) | MYOC, TIGR, GLC1A, JOAG, GPOA |
| Glaucoma, normal tension, susceptibility to, | OPA1, NTG, NPG |
| 606657 (3) | |
| Glaucoma, normal tension, susceptibility to, | OPTN, GLC1E, FIP2, HYPL, NRP |
| 606657 (3) | |
| Glaucoma, primary open angle, adult-onset, | CYP1B1, GLC3A |
| 137760 (3) | |
| Glaucoma, primary open angle, juvenile- | CYP1B1, GLC3A |
| onset, 137750 (3) | |
| Glioblastoma, early-onset, 137800 (3) | MSH2, COCA1, FCC1, HNPCC1 |
| Glioblastoma multiforme, somatic, 137800 | DMBT1 |
| (3) | |
| Glioblastoma, somatic, 137800 (3) | ERBB2, NGL, NEU, HER2 |
| Glioblastoma, somatic, 137800 (3) | LGI1, EPT, ETL1 |
| Glioblastoma, susceptibility to, 137800 (3) | PPARG, PPARG1, PPARG2 |
| Glomerulocystic kidney disease, | TCF2, HNF2 |
| hypoplastic, 137920 (3) | |
| Glomerulosclerosis, focal segmental, 1, | ACTN4, FSGS1, FSGS |
| 603278 (3) | |
| Glomerulosclerosis, focal segmental, 2, | TRPC6, TRP6, FSGS2 |
| 603965 (3) | |
| Glomerulosclerosis, focal segmental, 3, | CD2AP, CMS |
| 607832 (3) | |
| Glomuvenous malformations, 138000 (3) | GLML, GVM, VMGLOM |
| Glucocorticoid deficiency 2, 607398 (3) | MRAP, FALP, C21orf61 |
| Glucocorticoid deficiency, due to ACTH | MC2R |
| unresponsiveness, 202200 (3) | |
| Glucose/galactose malabsorption, 606824 | SLC5A1, SGLT1 |
| (3) | |
| Glucose transport defect, blood-brain | SLC2A1, GLUT1 |
| barrier, 606777 (3) | |
| Glucosidase I deficiency, 606056 (3) | GCS1 |
| Glutamate formiminotransferase deficiency, | FTCD |
| 229100 (3) | |
| Glutaricaciduria, type I, 231670 (3) | GCDH |
| Glutaricaciduria, type IIA, 231680 (3) | ETFA, GA2, MADD |
| Glutaricaciduria, type IIB, 231680 (3) | ETFB, MADD |
| Glutaricaciduria, type IIC, 231680 (3) | ETFDH, MADD |
| Glutathione synthetase deficiency, 266130 | GSS, GSHS |
| (3) | |
| Glycerol kinase deficiency, 307030 (3) | GK |
| Glycine encephalopathy, 605899 (3) | AMT, NKH, GCE |
| Glycine encephalopathy, 605899 (3) | GCSH, NKH |
| Glycine encephalopathy, 605899 (3) | GLDC, HYGN1, GCSP, GCE, NKH |
| Glycine N-methyltransferase deficiency, | GNMT |
| 606664 (3) | |
| Glycogenosis, hepatic, autosomal (3) | PHKG2 |
| Glycogenosis, X-linked hepatic, type I (3) | PHKA2, PHK |
| Glycogenosis, X-linked hepatic, type II (3) | PHKA2, PHK |
| Glycogen storage disease I (3) | G6PC, G6PT |
| Glycogen storage disease Ib, 232220 (3) | G6PT1 |
| Glycogen storage disease Ic, 232240 (3) | G6PT1 |
| Glycogen storage disease II, 232300 (3) | GAA |
| Glycogen storage disease IIb, 300257 (3) | LAMP2, LAMPB |
| Glycogen storage disease IIIa (3) | AGL, GDE |
| Glycogen storage disease IIIb (3) | AGL, GDE |
| Glycogen storage disease IV, 232500 (3) | GBE1 |
| Glycogen storage disease, type 0, 240600 | GYS2 |
| (3) | |
| Glycogen storage disease VI (3) | PYGL |
| Glycogen storage disease VII (3) | PFKM |
| GM1-gangliosidosis (3) | GLB1 |
| GM2-gangliosidosis, AB variant (3) | GM2A |
| GM2-gangliosidosis, several forms, 272800 | HEXA, TSD |
| (3) | |
| Gnthodiaphyseal dysplasia, 166260 (3) | TMEM16E, GDD1 |
| Goiter, congenital (3) | TPO, TPX |
| Goiter, nonendemic, simple (3) | TG, AITD3 |
| Goldberg-Shprintzen megacolon syndrome, | KIAA1279 |
| 609460 (3) | |
| Gonadal dysgenesis, 46XY, partial, with | DHH |
| minifascicular neuropathy, 607080 (3) | |
| Gonadal dysgenesis, XY type (3) | SRY, TDF |
| GRACILE syndrome, 603358 (3) | BCS1L, FLNMS, GRACILE |
| Graft-versus-host disease, protection | IL10, CSIF |
| against (3) | |
| Graves disease, susceptibility to, 275000 (3) | CTLA4 |
| Graves disease, susceptibility to, 3, 275000 | GC, DBP |
| (3) | |
| Greenberg dysplasia, 215140 (3) | LBR, PHA |
| Greig cephalopolysyndactyly syndrome, | GLI3, PAPA, PAPB, ACLS |
| 175700 (3) | |
| Griscelli syndrome, type 1, 214450 (3) | MYO5A, MYH12, GS1 |
| Griscelli syndrome, type 2, 607624 (3) | RAB27A, RAM, GS2 |
| Griscelli syndrome, type 3, 609227 (3) | MLPH |
| Growth hormone deficient dwarfism (3) | GHRHR |
| Growth hormone insensitivity with | STAT5B |
| immunodeficiency, 245590 (3) | |
| Growth retardation with deafness and | IGF1 |
| mental retardation due to IGF1 deficiency, | |
| 608747 (3) | |
| Guttmacher syndrome, 176305 (3) | HOXA13, HOX1J |
| Gyrate atrophy of choroid and retina with | OAT |
| ornithinemia, B6 responsive or unresponsive | |
| (3) | |
| Hailey-Hailey disease, 169600 (3) | ATP2C1, BCPM, HHD |
| Haim-Munk syndrome, 245010 (3) | CTSC, CPPI, PALS, PLS, HMS |
| Hand-foot-uterus syndrome, 140000 (3) | HOXA13, HOX1J |
| Harderoporphyrinuria (3) | CPO |
| HARP syndrome, 607236 (3) | PANK2, NBIA1, PKAN, HARP |
| Hartnup disorder, 234500 (3) | SLC6A19, HND |
| Hay-Wells syndrome, 106260 (3) | TP73L, TP63, KET, EEC3, SHFM4, |
| | LMS, RHS |
| HDL deficiency, familial, 604091 (3) | ABCA1, ABC1, HDLDT1, TGD |
| HDL response to hormone replacement, | ESR1, ESR |
| augmented (3) | |
| Hearing loss, low-frequency sensorineural, | WFS1, WFRS, WFS, DFNA6 |
| 600965 (3) | |
| Heart block, nonprogressive, 113900 (3) | SCN5A, LQT3, IVF, HB1, SSS1 |
| Heart block, progressive, type I, 113900 (3) | SCN5A, LQT3, IVF, HB1, SSS1 |
| Heinz body anemia (3) | HBA2 |
| Heinz body anemias, alpha-(3) | HBA1 |
| Heinz body anemias, beta-(3) | HBB |
| HELLP syndrome, maternal, of pregnancy | HADHA, MTPA |
| (3) | |
| Hemangioblastoma, cerebellar, somatic (3) | VHL |
| Hemangioma, capillary infantile, somatic, | FLT4, VEGFR3, PCL |
| 602089 (3) | |
| Hemangioma, capillary infantile, somatic, | KDR |
| 602089 (3) | |
| Hematopoiesis, cyclic, 162800 (3) | ELA2 |
| Hematuria, familial benign (3) | COL4A4 |
| Heme oxygenase-1 deficiency (3) | HMOX1 |
| Hemiplegic migraine, familial, 141500 (3) | CACNA1A, CACNL1A4, SCA6 |
| Hemochromatosis (3) | HFE, HLA-H, HFE1 |
| Hemochromatosis, juvenile, 602390 (3) | HAMP, LEAP1, HEPC, HFE2 |
| Hemochromatosis, juvenile, digenic, 602390 | HAMP, LEAP1, HEPC, HFE2 |
| (3) | |
| Hemochromatosis, type 2A, 602390 (3) | HJV, HFE2A |
| Hemochromatosis, type 3, 604250 (3) | TFR2, HFE3 |
| Hemochromatosis, type 4, 606069 (3) | SLC40A1, SLC11A3, FPN1, IREG1, |
| | HFE4 |
| Hemoglobin H disease (3) | HBA2 |
| Hemolytic anemia due to adenylate kinase | AK1 |
| deficiency (3) | |
| Hemolytic anemia due to band 3 defect | SLC4A1, AE1, EPB3 |
| defect (3) | |
| Hemolytic anemia due to | BPGM |
| bisphosphoglycerate mutase deficiency (3) | |
| Hemolytic anemia due to G6PD deficiency | G6PD, G6PD1 |
| (3) | |
| Hemolytic anemia due to gamma- | GCLC, GLCLC |
| glutamylcysteine synthetase deficiency, | |
| 230450 (3) | |
| Hemolytic anemia due to glucosephosphate | GPI |
| isomerase deficiency (3) | |
| Hemolytic anemia due to glutathione | GSS, GSHS |
| synthetase deficiency, 231900 (3) | |
| Hemolytic anemia due to hexokinase | HK1 |
| deficiency (3) | |
| Hemolytic anemia due to PGK deficiency (3) | PGK1, PGKA |
| Hemolytic anemia due to triosephosphate | TPI1 |
| isomerase deficiency (3) | |
| Hemolytic-uremic syndrome, 235400 (3) | HF1, CFH, HUS |
| Hemophagocytic lymphohistiocytosis, | PRF1, HPLH2 |
| familial, 2, 603553 (3) | |
| Hemophagocytic lymphohistiocytosis, | UNC13D, MUNC13-4, HPLH3, HLH3, |
| familial, 3, 608898 (3) | FHL3 |
| Hemophilia A (3) | F8, F8C, HEMA |
| Hemophilia B (3) | F9, HEMB |
| Hemorrhagic diathesis due to | PI, AAT |
| \\|grave over ( )\|antithrombin\' Pittsburgh (3) | |
| Hemorrhagic diathesis due to factor V | F5 |
| deficiency (3) | |
| Hemosiderosis, systemic, due to | CP |
| aceruloplasminemia, 604290 (3) | |
| Hepatic adenoma, 142330 (3) | TCF1, HNF1A, MODY3 |
| Hepatic failure, early onset, and neurologic | SCOD1, SCO1 |
| disorder (3) | |
| Hepatic lipase deficiency (3) | LIPC |
| Hepatoblastoma (3) | CTNNB1 |
| Hepatocellular cancer, 114550 (3) | PDGFRL, PDGRL, PRLTS |
| Hepatocellular carcinoma, 114550 (3) | AXIN1, AXIN |
| Hepatocellular carcinoma, 114550 (3) | CTNNB1 |
| Hepatocellular carcinoma, 114550 (3) | TP53, P53, LFS1 |
| Hepatocellular carcinoma (3) | IGF2R, MPRI |
| Hepatocellular carcinoma, childhood type, | MET |
| 114550 (3) | |
| Hepatocellular carcinoma, somatic, 114550 | CASP8, MCH5 |
| (3) | |
| Hereditary hemorrhagic telangiectasia-1, | ENG, END, HHT1, ORW |
| 187300 (3) | |
| Hereditary hemorrhagic telangiectasia-2, | ACVRL1, ACVRLK1, ALK1, HHT2 |
| 600376 (3) | |
| Hereditary persistence of alpha-fetoprotein | AFP, HPAFP |
| (3) | |
| Hermansky-Pudlak syndrome, 203300 (3) | HPS1 |
| Hermansky-Pudlak syndrome, 203300 (3) | HPS3 |
| Hermansky-Pudlak syndrome, 203300 (3) | HPS4 |
| Hermansky-pudlak syndrome, 203300 (3) | HPS5, RU2, KIAA1017 |
| Hermansky-Pudlak syndrome, 203300 (3) | HPS6, RU |
| Hermansky-Pudlak syndrome, 608233 (3) | AP3B1, ADTB3A, HPS2 |
| Hermansky-Pudlak syndrome 7, 203300 (3) | DTNBP1, HPS7 |
| Heterotaxy, visceral, 605376 (3) | CFC1, CRYPTIC, HTX2 |
| Heterotaxy, X-linked visceral, 306955 (3) | ZIC3, HTX1, HTX |
| Heterotopia, periventricular, 300049 (3) | FLNA, FLN1, ABPX, NHBP, OPD1, |
| | OPD2, FMD, MNS |
| Heterotopia, periventricular, ED variant, | FLNA, FLN1, ABPX, NHBP, OPD1, |
| 300537 (3) | OPD2, FMD, MNS |
| Heterotopia, periventricular nodular, with | FLNA, FLN1, ABPX, NHBP, OPD1, |
| frontometaphyseal dysplasia, 300049 (3) | OPD2, FMD, MNS |
| Hex A pseudodeficiency, 272800 (3) | HEXA, TSD |
| High-molecular-weight kininogen deficiency | KNG |
| (3) | |
| Hirschsprung disease, 142623 (3) | EDN3 |
| Hirschsprung disease, 142623 (3) | GDNF |
| Hirschsprung disease, 142623 (3) | NRTN, NTN |
| Hirschsprung disease, 142623 (3) | RET, MEN2A |
| Hirschsprung disease-2, 600155 (3) | EDNRB, HSCR2, ABCDS |
| Hirschsprung disease, cardiac defects, and | ECE1 |
| autonomic dysfunction (3) | |
| Hirschsprung disease, short-segment, | PMX2B, NBPHOX, PHOX2B |
| 142623 (3) | |
| Histidinemia, 235800 (3) | HAL, HSTD |
| Histiocytoma (3) | TP53, P53, LFS1 |
| HIV-1 disease, delayed progression of (3) | CCL5, SCYA5, D17S136E, TCP228 |
| HIV-1 disease, rapid progression of (3) | CCL5, SCYA5, D17S136E, TCP228 |
| HIV-1, susceptibility to (3) | IL10, CSIF |
| HIV infection, susceptibility/resistance to (3) | CMKBR2, CCR2 |
| HIV infection, susceptibility/resistance to (3) | CMKBR5, CCCKR5 |
| HMG-CoA lyase deficiency (3) | HMGCL |
| HMG-CoA synthase-2 deficiency, 605911 | HMGCS2 |
| (3) | |
| Holocarboxylase synthetase deficiency, | HLCS, HCS |
| 253270 (3) | |
| Holoprosencephaly-2, 157170 (3) | SIX3, HPE2 |
| Holoprosencephaly-3, 142945 (3) | SHH, HPE3, HLP3, SMMCI |
| Holoprosencephaly-4, 142946 (3) | TGIF, HPE4 |
| Holoprosencephaly-5, 609637 (3) | ZIC2, HPE5 |
| Holoprosencephaly-7 (3) | PTCH, NBCCS, BCNS, HPE7 |
| Holt-Oram syndrome, 142900 (3) | TBX5 |
| Homocysteine, total plasma, elevated (3) | CTH |
| Homocystinuria, B6-responsive and | CBS |
| nonresponsive types (3) | |
| Homocystinuria due to MTHFR deficiency, | MTHFR |
| 236250 (3) | |
| Homocystinuria-megaloblastic anemia, cbl E | MTRR |
| type, 236270 (3) | |
| Homozygous 2p16 deletion syndrome, | SLC3A1, ATR1, D2H, NBAT |
| 606407 (3) | |
| Hoyeraal-Hreidarsson syndrome, 300240 | DKC1, DKC |
| (3) | |
| HPFH, deletion type (3) | HBB |
| HPFH, nondeletion type A (3) | HBG1 |
| HPFH, nondeletion type G (3) | HBG2 |
| HPRT-related gout, 300323 (3) | HPRT1, HPRT |
| H. pylori infection, susceptibility to, 600263 | IFNGR1 |
| (3) | |
| Huntington disease (3) | HD, IT15 |
| Huntington disease-like 1, 603218 (3) | PRNP, PRIP |
| Huntington disease-like 2, 606438 (3) | JPH3, JP3, HDL2 |
| Huntington disease-like-4, 607136 (3) | TBP, SCA17 |
| Hyalinosis, infantile systemic, 236490 (3) | ANTXR2, CMG2, JHF, ISH |
| Hydrocephalus due to aqueductal stenosis, | L1CAM, CAML1, HSAS1 |
| 307000 (3) | |
| Hydrocephalus with congenital idiopathic | L1CAM, CAML1, HSAS1 |
| intestinal pseudoobstruction, 307000 (3) | |
| Hydrocephalus with Hirschsprung disease | L1CAM, CAML1, HSAS1 |
| and cleft palate, 142623 (3) | |
| Hyperalphalipoproteinemia, 143470 (3) | CETP |
| Hyperammonemia with hypoornithinemia, | PYCS, GSAS |
| hypocitrullinemia, hypoargininemia, and | |
| hypoprolinemia (3) | |
| Hyperandrogenism, nonclassic type, due to | CYP21A2, CYP21, CA21H |
| 21-hydroxylase deficiency (3) | |
| Hyperapobetalipoproteinemia, susceptibility | PPARA, PPAR |
| to (3) | |
| Hyperbilirubinemia, familial transcient | UGT1A1, UGT1, GNT1 |
| neonatal, 237900 (3) | |
| Hypercalciuria, absorptive, susceptibility to, | SAC, HCA2 |
| 143870 (3) | |
| Hypercholanemia, familial, 607748 (3) | BAAT |
| Hypercholanemia, familial, 607748 (3) | EPHX1 |
| Hypercholanemia, familial, 607748 (3) | TJP2, ZO2 |
| Hypercholesterolemia, due to ligand- | APOB, FLDB |
| defective apo B, 144010 (3) | |
| Hypercholesterolemia, familial, 143890 (3) | LDLR, FHC, FH |
| Hypercholesterolemia, familial, 3, 603776 | PCSK9, NARC1, HCHOLA3, FH3 |
| (3) | |
| Hypercholesterolemia, familial, autosomal | ARH, FHCB2, FHCB1 |
| recessive, 603813 (3) | |
| Hypercholesterolemia, familial, due to LDLR | EPHX2 |
| defect, modifier of, 143890 (3) | |
| Hypercholesterolemia, familial, modification | APOA2 |
| of, 143890 (3) | |
| Hypercholesterolemia, susceptibility to, | GSBS |
| 143890 (3) | |
| Hypercholesterolemia, susceptibility to, | ITIH4, PK120, ITIHL1 |
| 143890 (3) | |
| Hyperekplexia and spastic paraparesis (3) | GLRA1, STHE |
| Hyperekplexia, autosomal recessive, | GLRB |
| 149400 (3) | |
| Hypereosinophilic syndrome, idiopathic, | PDGFRA |
| resistant to imatinib, 607685 (3) | |
| Hyperferritinemia-cataract syndrome, | FTL |
| 600886 (3) | |
| Hyper-IgD syndrome, 260920 (3) | MVK, MVLK |
| Hyperinsulinism, familial, 602485 (3) | GCK |
| Hyperinsulinism-hyperammonemia | GLUD1 |
| syndrome, 606762 (3) | |
| Hyperkalemic periodic paralysis, 170500 (3) | SCN4A, HYPP, NAC1A |
| Hyperkeratotic cutaneous capillary-venous | CCM1, CAM, KRIT1 |
| malformations associated with cerebral | |
| capillary malformations, 116860 (3) | |
| Hyperlipidemia, familial combined, | USF1, HYPLIP1 |
| susceptibility to, 602491 (3) | |
| Hyperlipoproteinemia, type Ib, 207750 (3) | APOC2 |
| Hyperlipoproteinemia, type III (3) | APOE, AD2 |
| Hyperlysinemia, 238700 (3) | AASS |
| Hypermethioninemia, persistent, autosomal | MAT1A, MATA1, SAMS1 |
| dominant, due to methionine | |
| adenosyltransferase I/III deficiency (3) | |
| Hypermethioninemia with deficiency of S- | AHCY, SAHH |
| adenosylhomocysteine hydrolase (3) | |
| Hyperornithinemia-hyperammonemia- | SLC25A15, ORNT1, HHH |
| homocitrullinemia syndrome, 238970 (3) | |
| Hyperostosis, endosteal, 144750 (3) | LRP5, BMND1, LRP7, LR3, OPPG, |
| | VBCH2 |
| Hyperoxaluria, primary, type I, 259900 (3) | AGXT, SPAT |
| Hyperoxaluria, primary, type II, 260000 (3) | GRHPR, GLXR |
| Hyperparathyroidism, AD, 145000 (3) | MEN1 |
| Hyperparathyroidism, familial primary, | HRPT2, C1orf28 |
| 145000 (3) | |
| Hyperparathyroidism-jaw tumor syndrome, | HRPT2, C1orf28 |
| 145001 (3) | |
| Hyperparathyroidism, neonatal, 239200 (3) | CASR, HHC1, PCAR1, FIH |
| Hyperphenylalaninemia due to pterin-4a- | PCBD, DCOH |
| carbinolamine dehydratase deficiency, | |
| 264070 (3) | |
| Hyperphenylalaninemia, mild (3) | PAH, PKU1 |
| Hyperproinsulinemia, familial (3) | INS |
| Hyperprolinemia, type I, 239500 (3) | PRODH, PRODH2, SCZD4 |
| Hyperprolinemia, type II, 239510 (3) | ALDH4A1, ALDH4, P5CDH |
| Hyperproreninemia (3) | REN |
| Hyperprothrombinemia (3) | F2 |
| Hypertension, diastolic, resistance to, | KCNMB1 |
| 608622 (3) | |
| Hypertension, early-onset, autosomal | NR3C2, MLR, MCR |
| dominant, with exacerbation in pregnancy, | |
| 605115 (3) | |
| Hypertension, essential, 145500 (3) | AGTR1, AGTR1A, AT2R1 |
| Hypertension, essential, 145500 (3) | PTGIS, CYP8A1, PGIS, CYP8 |
| Hypertension, essential, salt-sensitive, | ADD1 |
| 145500 (3) | |
| Hypertension, essential, susceptibility to, | AGT, SERPINA8 |
| 145500 (3) | |
| Hypertension, essential, susceptibility to, | ECE1 |
| 145500 (3) | |
| Hypertension, essential, susceptibility to, | GNB3 |
| 145500 (3) | |
| Hypertension, insulin resistance-related, | RETN, RSTN, FIZZ3 |
| susceptibility to, 125853 (3) | |
| Hypertension, mild low-renin (3) | HSD11B2, HSD11K |
| Hypertension, pregnancy-induced, 189800 | NOS3 |
| (3) | |
| Hypertension, salt-sensitive essential, | CYP3A5, P450PCN3 |
| susceptibility to, 145500 (3) | |
| Hypertension, susceptibility to, 145500 (3) | NOS3 |
| Hyperthroidism, congenital (3) | TSHR |
| Hyperthyroidism, congenital (3) | TPO, TPX |
| Hypertriglyceridemia, one form (3) | APOA1 |
| Hypertriglyceridemia, susceptibility to, | APOA5 |
| 145750 (3) | |
| Hypertriglyceridemia, susceptibility to, | LIPI, LPDL, PRED5 |
| 145750 (3) | |
| Hypertriglyceridemia, susceptibility to, | RP1, ORP1 |
| 145750 (3) | |
| Hypertrypsinemia, neonatal (3) | CFTR, ABCC7, CF, MRP7 |
| Hyperuricemic nephropathy, familial | UMOD, HNFJ, FJHN, MCKD2, |
| juvenile, 162000 (3) | ADMCKD2 |
| Hypoaldosteronism, congenital, due to CMO | CYP11B2 |
| I deficiency, 203400 (3) | |
| Hypoaldosteronism, congenital, due to CMO | CYP11B2 |
| II deficiency (3) | |
| Hypoalphalipoproteinemia (3) | APOA1 |
| Hypobetalipoproteinemia (3) | APOB, FLDB |
| Hypocalcemia, autosomal dominant, | CASR, HHC1, PCAR1, FIH |
| 146200 (3) | |
| Hypocalcemia, autosomal dominant, with | CASR, HHC1, PCAR1, FIH |
| Bartter syndrome (3) | |
| Hypocalciuric hypercalcemia, type I, 145980 | CASR, HHC1, PCAR1, FIH |
| (3) | |
| Hypoceruloplasminemia, hereditary, 604290 | CP |
| (3) | |
| Hypochondroplasia, 146000 (3) | FGFR3, ACH |
| Hypochromic microcytic anemia (3) | HBA2 |
| Hypodontia, 106600 (3) | PAX9 |
| Hypodontia, autosomal dominant, 106600 | MSX1, HOX7, HYD1, OFC5 |
| (3) | |
| Hypodontia with orofacial cleft, 106600 (3) | MSX1, HOX7, HYD1, OFC5 |
| Hypofibrinogenemia, gamma type (3) | FGG |
| Hypoglobulinemia and absent B cells (3) | BLNK, SLP65 |
| Hypoglycemia of infancy, leucine-sensitive, | ABCC8, SUR, PHHI, SUR1 |
| 240800 (3) | |
| Hypoglycemia of infancy, persistent | ABCC8, SUR, PHHI, SUR1 |
| hyperinsulinemic, 256450 (3) | |
| Hypogonadism, hypergonadotropic (3) | LHB |
| Hypogonadotropic hypogonadism, 146110 | GPR54 |
| (3) | |
| Hypogonadotropic hypogonadism, 146110 | NELF |
| (3) | |
| Hypogonadotropic hypogonadism (3) | GNRHR, LHRHR |
| Hypogonadotropic hypogonadism (3) | LHCGR |
| Hypohaptoglobinemia (3) | HP |
| Hypokalemic periodic paralysis, 170400 (3) | CACNA1S, CACNL1A3, CCHL1A3 |
| Hypokalemic periodic paralysis, 170400 (3) | KCNE3, HOKPP |
| Hypokalemic periodic paralysis, 170400 (3) | SCN4A, HYPP, NAC1A |
| Hypolactasia, adult type, 223100 (3) | LCT, LAC, LPH |
| Hypolactasia, adult type, 223100 (3) | MCM6 |
| Hypomagnesemia-2, renal, 154020 (3) | FXYD2, ATP1G1, HOMG2 |
| Hypomagnesemia, primary, 248250 (3) | CLDN16, PCLN1 |
| Hypomagnesemia with secondary | TRPM6, CHAK2 |
| hypocalcemia, 602014 (3) | |
| Hypoparathyroidism, autosomal dominant(3) | PTH |
| Hypoparathyroidism, autosomal recessive | PTH |
| (3) | |
| Hypoparathyroidism, familial isolated, | GCMB |
| 146200 (3) | |
| Hypoparathyroidism-retardation- | TBCE, KCS, KCS1, HRD |
| dysmorphism syndrome, 241410 (3) | |
| Hypoparathyroidism, sensorineural | GATA3, HDR |
| deafness, and renal dysplasia, 146255 (3) | |
| Hypophosphatasia, childhood, 241510 (3) | ALPL, HOPS, TNSALP |
| Hypophosphatasia, infantile, 241500 (3) | ALPL, HOPS, TNSALP |
| Hypophosphatemia, type III (3) | CLCN5, CLCK2, NPHL2, DENTS |
| Hypophosphatemia, X-linked, 307800 (3) | PHEX, HYP, HPDR1 |
| Hypophosphatemic rickets, autosomal | FGF23, ADHR, HPDR2, PHPTC |
| dominant, 193100 (3) | |
| Hypoplastic enamel pitting, localized, | ENAM |
| 608563 (3) | |
| Hypoplastic left heart syndrome, 241550 (3) | GJA1, CX43, ODDD, SDTY3, ODOD |
| Hypoprothrombinemia (3) | F2 |
| Hypothyroidism, autoimmune, 140300 (3) | CTLA4 |
| Hypothyroidism, congenital, 274400 (3) | SLC5A5, NIS |
| Hypothyroidism, congenital, due to DUOX2 | DUOX2, THOX2 |
| deficiency, 607200 (3) | |
| Hypothyroidism, congenital, due to thyroid | PAX8 |
| dysgenesis or hypoplasia, 218700 (3) | |
| Hypothyroidism, congenital, due to TSH | TSHR |
| resistance, 275200 (3) | |
| Hypothyroidism, hereditary congenital (3) | TG, AITD3 |
| Hypothyroidism, nongoitrous (3) | TSHB |
| Hypothyroidism, subclinical (3) | TSHR |
| Hypotrichosis, congential, with juvenile | CDH3, CDHP, PCAD, HJMD |
| macular dystrophy, 601553 (3) | |
| Hypotrichosis, localized, autosomal | DSG4, LAH |
| recessive, 607903 (3) | |
| Hypotrichosis-lymphedema-telangiectasia | SOX18, HLTS |
| syndrome, 607823 (3) | |
| Hypotrichosis simplex of scalp, 146520 (3) | CDSN, HTSS |
| Hypouricemia, renal, 220150 (3) | SLC22A12, OAT4L, URAT1 |
| Hystrix-like ichthyosis with deafness, | GJB2, CX26, DFNB1, PPK, DFNA3, |
| 602540 (3) | KID, HID |
| Ichthyosiform erythroderma, congenital, | TGM1, ICR2, LI1 |
| 242100 (3) | |
| Ichthyosiform erythroderma, congenital, | ALOX12B |
| nonbullous, 1, 242100 (3) | |
| Ichthyosiform erythroderma, congenital, | ALOXE3 |
| nonbullous, 1, 242100 (3) | |
| Ichthyosis bullosa of Siemens, 146800 (3) | KRT2A, KRT2E |
| Ichthyosis, congenital, autosomal recessive | ICHYN |
| (3) | |
| Ichthyosis, cyclic, with epidermolytic | KRT10 |
| hyperkeratosis, 607602 (3) | |
| Ichthyosis, harlequin, 242500 (3) | ABCA12, ICR2B, LI2 |
| Ichthyosis histrix, Curth-Macklin type, | KRT1 |
| 146590 (3) | |
| Ichthyosis, lamellar 2, 601277 (3) | ABCA12, ICR2B, LI2 |
| Ichthyosis, lamellar, autosomal recessive, | TGM1, ICR2, LI1 |
| 242300 (3) | |
| Ichthyosis, X-linked (3) | STS, ARSC1, ARSC, SSDD |
| ICOS deficiency, 607594 (3) | ICOS, AILIM |
| IgE levels QTL, 147050 (3) | PHF11, NYREN34 |
| IgG2 deficiency, selective (3) | IGHG2 |
| IgG receptor 1, phagocytic, familial | FCGR1A, IGFR1, CD64 |
| deficiency of (3) | |
| Immunodeficiency-centromeric instability- | DNMT3B, ICF |
| facial anomalies syndrome, 242860 (3) | |
| Immunodeficiency due to defect in CD3- | CD3E |
| epsilon (3) | |
| Immunodeficiency due to defect in CD3- | CD3G |
| gamma (3) | |
| Immunodeficiency with hyper-IgM, type 2, | AICDA, AID, HIGM2 |
| 605258 (3) | |
| Immunodeficiency with hyper-IgM, type 3, | TNFRSF5, CD40 |
| 606843 (3) | |
| Immunodeficiency with hyper IgM, type 4, | UNG, DGU, HIGM4 |
| 608106 (3) | |
| Immunodeficiency, X-linked, with hyper-IgM, | TNFSF5, CD40LG, HIGM1, IGM |
| 308230 (3) | |
| Immunodysregulation, polyendocrinopathy, | FOXP3, IPEX, AHD, XPID, PIDX |
| and enteropathy, X-linked, 304790 (3) | |
| Immunoglobulin A deficiency, 609529 (3) | TNFRSF14B, TACI |
| Inclusion body myopathy-3, 605637 (3) | MYH2 |
| Inclusion body myopathy, autosomal | GNE, GLCNE, IBM2, DMRV, NM |
| recessive, 600737 (3) | |
| Inclusion body myopathy with early-onset | VCP, IBMPFD |
| Paget disease and frontotemporal dementia, | |
| 167320 (3) | |
| Incontinentia pigmenti, type II, 308300 (3) | IKBKG, NEMO, FIP3, IP2 |
| Infantile spasm syndrome, 308350 (3) | ARX, ISSX, PRTS, MRXS1, MRX36, |
| | MRX54 |
| Infundibular hypoplasia and hypopituitarism | SOX3, MRGH |
| (3) | |
| Inosine triphosphatase deficiency (3) | ITPA |
| Insensitivity to pain, congenital, with | NTRK1, TRKA, MTC |
| anhidrosis, 256800 (3) | |
| Insomnia (3) ( ) | GABRB3 |
| Insomnia, fatal familial, 600072 (3) | PRNP, PRIP |
| Insulin resistance, severe, digenic, 604367 | PPARG, PPARG1, PPARG2 |
| (3) | |
| Insulin resistance, severe, digenic, 604367 | PPP1R3A, PPP1R3 |
| (3) | |
| Insulin resistance, susceptibility to (3) | PTPN1, PTP1B |
| Interleukin-2 receptor, alpha chain, | IL2RA, IL2R |
| deficiency of (3) | |
| Intervertebral disc disease, susceptibility to, | COL9A2, EDM2 |
| 603932 (3) | |
| Intervertebral disc disease, susceptibility to, | COL9A3, EDM3, IDD |
| 603932 (3) | |
| Intrauterine and postnatal growth retardation | IGF1R |
| (3) | |
| Intrauterine and postnatal growth retardation | IGF2 |
| (3) | |
| Intrinsic factor deficiency, 261000 (3) | GIF, IF |
| IRAK4 deficiency, 607676 (3) | IRAK4, REN64 |
| Iridogoniodysgenesis, 601631 (3) | FOXC1, FKHL7, FREAC3 |
| Iridogoniodysgenesis syndrome-2, 137600 | PITX2, IDG2, RIEG1, RGS, IGDS2 |
| (3) | |
| Iris hypoplasia and glaucoma (3) | FOXC1, FKHL7, FREAC3 |
| Iron deficiency anemia, susceptibility to (3) | TF |
| Iron overload, autosomal dominant (3) | FTH1, FTHL6 |
| Isolated growth hormone deficiency, Illig | GH1, GHN |
| type with absent GH and Kowarski type with | |
| bioinactive GH (3) | |
| Isovaleric acidemia, 243500 (3) | IVD |
| Jackson-Weiss syndrome, 123150 (3) | FGFR1, FLT2, KAL2 |
| Jackson-Weiss syndrome, 123150 (3) | FGFR2, BEK, CFD1, JWS |
| Jensen syndrome, 311150 (3) | TIMM8A, DFN1, DDP, MTS, DDP1 |
| Jervell and Lange-Nielsen syndrome, | KCNE1, JLNS, LQT5 |
| 220400 (3) | |
| Jervell and Lange-Nielsen syndrome, | KCNQ1, KCNA9, LQT1, KVLQT1, |
| 220400 (3) | ATFB1 |
| Joubert syndrome, 213300 (3) | NPHP1, NPH1, SLSN1 |
| Joubert syndrome-3, 608629 (3) | AHI1 |
| Juberg-Marsidi syndrome, 309590 (3) | ATRX, XH2, XNP, MRXS3, SHS |
| Juvenile polyposis/hereditary hemorrhagic | MADH4, DPC4, SMAD4, JIP |
| telangiectasia syndrome, 175050 (3) | |
| Kallikrein, decreased urinary activity of (3) | KLK1, KLKR |
| Kallmann syndrome 2, 147950 (3) | FGFR1, FLT2, KAL2 |
| Kallmann syndrome (3) | KALI, KMS, ADMLX |
| Kanzaki disease, 609242 (3) | NAGA |
| Kaposi sarcoma, susceptibility to, 148000 | IL6, IFNB2, BSF2 |
| (3) | |
| Kappa light chain deficiency (3) | IGKC |
| Kartagener syndrome, 244400 (3) | DNAH11, DNAHC11 |
| Kartagener syndrome, 244400 (3) | DNAH5, HL1, PCD, CILD3 |
| Kartagener syndrome, 244400 (3) | DNAI1, CILD1, ICS, PCD |
| Kenny-Caffey syndrome-1, 244460 (3) | TBCE, KCS, KCS1, HRD |
| Keratitis, 148190 (3) | PAX6, AN2, MGDA |
| Keratitis-ichthyosis-deafness syndrome, | GJB2, CX26, DFNB1, PPK, DFNA3, |
| 148210 (3) | KID, HID |
| Keratoconus, 148300 (3) | VSX1, RINX, PPCD, PPD, KTCN |
| Keratoderma, palmoplantar, with deafness, | GJB2, CX26, DFNB1, PPK, DFNA3, |
| 148350 (3) | KID, HID |
| Keratosis follicularis spinulosa decalvans, | SAT, SSAT, KFSD |
| 308800 (3) | |
| Keratosis palmoplantaria striata, 148700 (3) | KRT1 |
| Keratosis palmoplantaris striata I, 148700 | DSG1 |
| (3) | |
| Keratosis palmoplantaris striata II (3) | DSP, KPPS2, PPKS2 |
| Keratosis palmoplantaris striata III, 607654 | KRT1 |
| (3) | |
| Ketoacidosis due to SCOT deficiency (3) | SCOT, OXCT |
| Keutel syndrome, 245150 (3) | MGP, NTI |
| Kindler syndrome, 173650 (3) | KIND1, URP1, C20orf42 |
| Kininogen deficiency (3) | KNG |
| Klippel-Trenaunay syndrome, 149000 (3) | VG5Q, HUS84971, FLJ10283 |
| Kniest dysplasia, 156550 (3) | COL2A1 |
| Knobloch syndrome, 267750 (3) | COL18A1, KNO |
| Krabbe disease, 245200 (3) | GALC |
| L-2-hydroxyglutaric aciduria, 236792 (3) | L2HGDH, C14orf160 |
| Lactate dehydrogenase-B deficiency (3) | LDHB |
| Lacticacidemia due to PDX1 deficiency, | PDX1 |
| 245349 (3) | |
| Langer mesomelic dysplasia, 249700 (3) | SHOX, GCFX, SS, PHOG |
| Langer mesomelic dysplasia, 249700 (3) | SHOXY |
| Laron dwarfism, 262500 (3) | GHR |
| Larson syndrome, 150250 (3) | FLNB, SCT, AOI |
| Laryngoonychocutaneous syndrome, | LAMA3, LOCS |
| 245660 (3) | |
| Lathosterolosis, 607330 (3) | SC5DL, ERG3 |
| LCHAD deficiency (3) | HADHA, MTPA |
| Lead poisoning, susceptibility to (3) | ALAD |
| Leanness, inherited (3) | AGRP, ART, AGRT |
| Leber congenital amaurosis, 204000 (3) | CRB1, RP12 |
| Leber congenital amaurosis, 204000 (3) | CRX, CORD2, CRD |
| Leber congenital amaurosis, 204000 (3) | RPGRIP1, LCA6, CORD9 |
| Leber congenital amaurosis-2, 204100 (3) | RPE65, RP20 |
| Leber congenital amaurosis, 604393 (3) | AIPL1, LCA4 |
| Leber congenital amaurosis, type I, 204000 | GUCY2D, GUC2D, LCA1, CORD6 |
| (3) | |
| Leber congenital amaurosis, type III, | RDH12, LCA3 |
| 604232 (3) | |
| Left-right axis malformations (3) | ACVR2B |
| Left-right axis malformations (3) | EBAF, TGFB4, LEFTY2, LEFTA, |
| | LEFTYA |
| Left ventricular noncompaction, familial | DTNA, D18S892E, DRP3, LVNC1 |
| isolated, 1, 604169 (3) | |
| Left ventricular noncompaction with | DTNA, D18S892E, DRP3, LVNC1 |
| congenital heart defects, 606617 (3) | |
| Legionaire disease, susceptibility to, 608556 | TLR5, TIL3 |
| (3) | |
| Leigh syndrome, 256000 (3) | BCS1L, FLNMS, GRACILE |
| Leigh syndrome, 256000 (3) | DLD, LAD, PHE3 |
| Leigh syndrome, 256000 (3) | NDUFS3 |
| Leigh syndrome, 256000 (3) | NDUFS4, AQDQ |
| Leigh syndrome, 256000 (3) | NDUFS7, PSST |
| Leigh syndrome, 256000 (3) | NDUFS8 |
| Leigh syndrome, 256000 (3) | NDUFV1, UQOR1 |
| Leigh syndrome, 256000 (3) | SDHA, SDH2, SDHF |
| Leigh syndrome, due to COX deficiency, | SURF1 |
| 256000 (3) | |
| Leigh syndrome due to cytochrome c | COX15 |
| oxidase deficiency, 256000 (3) | |
| Leigh syndrome, French-Canadian type, | LRPPRC, LRP130, LSFC |
| 220111 (3) | |
| Leigh syndrome, X-linked, 308930 (3) | PDHA1, PHE1A |
| Leiomyomatosis and renal cell cancer, | FH |
| 605839 (3) | |
| Leiomyomatosis, diffuse, with Alport | COL4A6 |
| syndrome, 308940 (3) | |
| Leopard syndrome, 151100 (3) | PTPN11, PTP2C, SHP2, NS1 |
| Leprechaunism, 246200 (3) | INSR |
| Leprosy, susceptibility to, 607572 (3) | PRKN, PARK2, PDJ |
| Leri-Weill dyschondrosteosis, 127300 (3) | SHOX, GCFX, SS, PHOG |
| Leri-Weill dyschondrosteosis, 127300 (3) | SHOXY |
| Lesch-Nyhan syndrome, 300322, (3) | HPRT1, HPRT |
| Leukemia-1, T-cell acute lymphocytic (3) | TAL1, TCL5, SCL |
| Leukemia-2, T-cell acute lymphoblastic (3) | TAL2 |
| Leukemia, acute lymphoblastic (3) | FLT3 |
| Leukemia, acute lymphoblastic (3) | NBS1, NBS |
| Leukemia, acute lymphoblastic (3) | ZNFN1A1, IK1, LYF1 |
| Leukemia, acute lymphoblastic, | HOXD4, HOX4B |
| susceptibility to (3) | |
| Leukemia, acute lymphocytic (3) | BCR, CML, PHL, ALL |
| Leukemia, acute myeloblastic (3) | ARNT |
| Leukemia, acute myelogenous (3) | KRAS2, RASK2 |
| Leukemia, acute myelogenous, 601626 (3) | GMPS |
| Leukemia, acute myeloid, 601626 (3) | AF10 |
| Leukemia, acute myeloid, 601626 (3) | ARHGEF12, LARG, KIAA0382 |
| Leukemia, acute myeloid, 601626 (3) | CALM, CLTH |
| Leukemia, acute myeloid, 601626 (3) | CEBPA, CEBP |
| Leukemia, acute myeloid, 601626 (3) | CHIC2, BTL |
| Leukemia, acute myeloid, 601626 (3) | FLT3 |
| Leukemia, acute myeloid, 601626 (3) | KIT, PBT |
| Leukemia, acute myeloid, 601626 (3) | LPP |
| Leukemia, acute myeloid, 601626 (3) | NPM1 |
| Leukemia, acute myeloid, 601626 (3) | NUP214, D9S46E, CAN, CAIN |
| Leukemia, acute myeloid, 601626 (3) | RUNX1, CBFA2, AML1 |
| Leukemia, acute myeloid, 601626 (3) | WHSC1L1, NSD3 |
| Leukemia, acute myeloid, reduced survival | FLT3 |
| in (3) | |
| Leukemia, acute myelomonocytic (3) | AF1Q |
| Leukemia, acute promyelocytic, NPM/RARA | NPM1 |
| type (3) | |
| Leukemia, acute promyelocytic, | NUMA1 |
| NUMA/RARA type (3) | |
| Leukemia, acute promyelocytic, | ZNF145, PLZF |
| PL2F/RARA type (3) | |
| Leukemia, acute promyelocytic, PML/RARA | PML, MYL |
| type (3) | |
| Leukemia, acute promyeloyctic, | STAT5B |
| STAT5B/RARA type (3) | |
| Leukemia, acute T-cell lymphoblastic (3) | AF10 |
| Leukemia, acute T-cell lymphoblastic (3) | CALM, CLTH |
| Leukemia, chronic lymphatic, susceptibility | ARL11, ARLTS1 |
| to, 151400 (3) | |
| Leukemia, chronic lymphatic, susceptibility | P2RX7, P2X7 |
| to, 151400 (3) | |
| Leukemia, chronic myeloid, 608232 (3) | BCR, CML, PHL, ALL |
| Leukemia, juvenile myelomonocytic, 607785 | GRAF |
| (3) | |
| Leukemia, juvenile myelomonocytic, 607785 | NF1, VRNF, WSS, NFNS |
| (3) | |
| Leukemia, juvenile myelomonocytic, 607785 | PTPN11, PTP2C, SHP2, NS1 |
| (3) | |
| Leukemia/lymphoma, B-cell, 2 (3) | BCL2 |
| Leukemia/lymphoma, chronic B-cell, 151400 | CCND1, PRAD1, BCL1 |
| (3) | |
| Leukemia/lymphoma, T-cell (3) | TCRA |
| Leukemia, megakaryoblastic, of Down | GATA1, GF1, ERYF1, NFE1 |
| syndrome, 190685 (3) | |
| Leukemia, megakaryoblastic, with or without | GATA1, GF1, ERYF1, NFE1 |
| Down syndrome, 190685 (3) | |
| Leukemia, Philadelphia chromosome- | ABL1 |
| positive, resistant to imatinib (3) | |
| Leukemia, post-chemotherapy, susceptibility | NQO1, DIA4, NMOR1 |
| to (3) | |
| Leukemia, T-cell acute lymphoblastic (3) | NUP214, D9S46E, CAN, CAIN |
| Leukocyte adhesion deficiency, 116920 (3) | ITGB2, CD18, LCAMB, LAD |
| Leukoencephalopathy with vanishing white | EIF2B1, EIF2BA |
| matter, 603896 (3) | |
| Leukoencephalopathy with vanishing white | EIF2B2 |
| matter, 603896 (3) | |
| Leukoencephalopathy with vanishing white | EIF2B3 |
| matter, 603896 (3) | |
| Leukoencephalopathy with vanishing white | EIF2B5, LVWM, CACH, CLE |
| matter, 603896 (3) | |
| Leukoencephaly with vanishing white | EIF2B4 |
| matter, 603896 (3) | |
| Leydig cell adenoma, with precocious | LHCGR |
| puberty (3) | |
| Lhermitte-Duclos syndrome (3) | PTEN, MMAC1 |
| Liddle syndrome, 177200 (3) | SCNN1B |
| Liddle syndrome, 177200 (3) | SCNN1G, PHA1 |
| Li Fraumeni syndrome, 151623 (3) | CDKN2A, MTS1, P16, MLM, CMM2 |
| Li-Fraumeni syndrome, 151623 (3) | TP53, P53, LFS1 |
| Li-Fraumeni syndrome, 609265 (3) | CHEK2, RAD53, CHK2, CDS1, LFS2 |
| LIG4 syndrome, 606593 (3) | LIG4 |
| Limb-mammary syndrome, 603543 (3) | TP73L, TP63, KET, EEC3, SHFM4, |
| | LMS, RHS |
| Lipodystrophy, congenital generalized, type | AGPAT2, LPAAB, BSCL, BSCL1 |
| 1, 608594 (3) | |
| Lipodystrophy, congenital generalized, type | BSCL2, SPG17 |
| 2, 269700 (3) | |
| Lipodystrophy, familial partial, 151660 (3) | LMNA, LMN1, EMD2, FPLD, CMD1A, |
| | HGPS, LGMD1B |
| Lipodystrophy, familial partial, 151660 (3) | PPARG, PPARG1, PPARG2 |
| Lipodystrophy, familial partial, with | PPARGC1A, PPARGC1 |
| decreased subcutaneous fat of face and | |
| neck (3) | |
| Lipoid adrenal hyperplasia, 201710 (3) | STAR |
| Lipoid congenital adrenal hyperplasia, | CYP11A, P450SCC |
| 201710 (3) | |
| Lipoid proteinosis, 247100 (3) | ECM1 |
| Lipoma (3) | HMGA2, HMGIC, BABL, LIPO |
| Lipoma (3) | LPP |
| Lipoma, sporadic (3) | MEN1 |
| Lipomatosis, mutiple, 151900 (3) | HMGA2, HMGIC, BABL, LIPO |
| Lipoprotein lipase deficiency (3) | LPL, LIPD |
| Lissencephaly-1, 607432 (3) | PAFAH1B1, LIS1 |
| Lissencephaly syndrome, Norman-Roberts | RELN, RL |
| type, 257320 (3) | |
| Lissencephaly, X-linked, 300067 (3) | DCX, DBCN, LISX |
| Lissencephaly, X-linked with ambiguous | ARX, ISSX, PRTS, MRXS1, MRX36, |
| genitalia, 300215 (3) | MRX54 |
| Listeria monocytogenes, susceptibility to (3) | CDH1, UVO |
| Loeys-Dietz syndrome, 609192 (3) | TGFBR1 |
| Loeys-Dietz syndrome, 609192 (3) | TGFBR2, HNPCC6 |
| Longevity, exceptional, 152430 (3) | CETP |
| Longevity, reduced, 152430 (3) | AKAP10 |
| Long QT syndrome-1, 192500 (3) | KCNQ1, KCNA9, LQT1, KVLQT1, |
| | ATFB1 |
| Long QT syndrome-2 (3) | KCNH2, LQT2, HERG |
| Long QT syndrome-3, 603830 (3) | SCN5A, LQT3, IVF, HB1, SSS1 |
| Long QT syndrome 4, 600919 (3) | ANK2, LQT4 |
| Long QT syndrome-5 (3) | KCNE1, JLNS, LQT5 |
| Long QT syndrome-6 (3) | KCNE2, MIRP1, LQT6 |
| Long QT syndrome-7, 170390 (3) | KCNJ2, HHIRK1, KIR2.1, IRK1, LQT7 |
| Lower motor neuron disease, progressive, | DCTN1 |
| without sensory symptoms, 607641 (3) | |
| Lowe syndrome, 309000 (3) | OCRL, LOCR, OCRL1, NPHL2 |
| Low renin hypertension, susceptibility to (3) | CYP11B2 |
| LPA deficiency, congenital (3) | LPA |
| Lumbar disc disease, susceptibility to, | CILP |
| 603932 (3) | |
| Lung cancer, 211980 (3) | KRAS2, RASK2 |
| Lung cancer, 211980 (3) | PPP2R1B |
| Lung cancer, 211980 (3) | SLC22A1L, BWSCR1A, IMPT1 |
| Lung cancer, somatic, 211980 (3) | MAP3K8, COT, EST, TPL2 |
| Lupus nephritis, susceptibility to (3) | FCGR2A, IGFR2, CD32 |
| Lymphangioleiomyomatosis, 606690 (3) | TSC1, LAM |
| Lymphangioleiomyomatosis, somatic, | TSC2, LAM |
| 606690 (3) | |
| Lymphedema and ptosis, 153000 (3) | FOXC2, FKHL14, MFH1 |
| Lymphedema-distichiasis syndrome, | FOXC2, FKHL14, MFH1 |
| 153400 (3) | |
| Lymphedema-distichiasis syndrome with | FOXC2, FKHL14, MFH1 |
| renal disease and diabetes mellitus (3) | |
| Lymphedema, hereditary I, 153100 (3) | FLT4, VEGFR3, PCL |
| Lymphedema, hereditary II, 153200 (3) | FOXC2, FKHL14, MFH1 |
| Lymphocytic leukemia, acute T-cell (3) | RAP1GDS1 |
| Lymphoma, B-cell non-Hodgkin, somatic (3) | ATM, ATA, AT1 |
| Lymphoma, diffuse large cell (3) | BCL8 |
| Lymphoma, follicular (3) | BCL10 |
| Lymphoma, MALT (3) | BCL10 |
| Lymphoma, mantle cell (3) | ATM, ATA, AT1 |
| Lymphoma, non-Hodgkin (3) | RAD54B |
| Lymphoma, non-Hodgkin (3) | RAD54L, HR54, HRAD54 |
| Lymphoma, progression of (3) | FCGR2B, CD32 |
| Lymphoma, somatic (3) | MAD1L1, TXBP181 |
| Lymphoma, T-cell (3) | MSH2, COCA1, FCC1, HNPCC1 |
| Lymphoproliferative syndrome, X-linked, | SH2D1A, LYP, IMD5, XLP, XLPD |
| 308240 (3) | |
| Lynch cancer family syndrome II, 114400 | MSH2, COCA1, FCC1, HNPCC1 |
| (3) | |
| Lysinuric protein intolerance, 222700 (3) | SLC7A7, LPI |
| Machado-Joseph disease, 109150 (3) | ATXN3, MJD, SCA3 |
| Macrocytic anemia, refractory, of 5q- | IRF1, MAR |
| syndrome, 153550 (3) | |
| Macrothrombocytopenia, 300367 (3) | GATA1, GF1, ERYF1, NFE1 |
| Macular corneal dystrophy, 217800 (3) | CHST6, MCDC1 |
| Macular degeneration, age-related, 1, | HF1, CFH, HUS |
| 603075 (3) | |
| Macular degeneration, age-related, 1, | HMCN1, FBLN6, FIBL6 |
| 603075 (3) | |
| Macular degeneration, age-related, 3, | FBLN5, ARMD3 |
| 608895 (3) | |
| Macular degeneration, juvenile, 248200 (3) | CNGB3, ACHM3 |
| Macular degeneration, X-linked atrophic (3) | RPGR, RP3, CRD, RP15, COD1 |
| Macular dystrophy (3) | RDS, RP7, PRPH2, PRPH, AVMD, |
| | AOFMD |
| Macular dystrophy, age-related, 2, 153800 | ABCA4, ABCR, STGD1, FFM, RP19 |
| (3) | |
| Macular dystrophy, autosomal dominant, | ELOVL4, ADMD, STGD2, STGD3 |
| chromosome 6-linked, 600110 (3) | |
| Macular dystrophy, vitelliform, 608161 (3) | RDS, RP7, PRPH2, PRPH, AVMD, |
| | AOFMD |
| Macular dystrophy, vitelliform type, 153700 | VMD2 |
| (3) | |
| Maculopathy, bull's-eye, 153870 (3) | VMD2 |
| Major depressive disorder and accelerated | FKBP5, FKBP51 |
| response to antidepressant drug treatment, | |
| 608616 (3) | |
| Malaria, cerebral, reduced risk of, 248310 | CD36 |
| (3) | |
| Malaria, cerebral, susceptibility to, 248310 | CD36 |
| (3) | |
| Malaria, cerebral, susceptibility to (3) | ICAM1 |
| Malaria, cerebral, susceptibility to (3) | TNF, TNFA |
| Malaria, resistance to, 248310 (3) | GYPC, GE, GPC |
| Malaria, resistance to, 248310 (3) | NOS2A, NOS2 |
| Malignant hyperthermia susceptibility 1, | RYR1, MHS, CCO |
| 145600 (3) | |
| Malignant hyperthermia susceptibility 5, | CACNA1S, CACNL1A3, CCHL1A3 |
| 601887 (3) | |
| Malonyl-CoA decarboxylase deficiency, | MLYCD, MCD |
| 248360 (3) | |
| MALT lymphoma (3) | MALT1, MLT |
| Mandibuloacral dysplasia with type B | ZMPSTE24, FACE1, STE24, MADB |
| lipodystrophy, 608612 (3) | |
| Mannosidosis, alpha-, types I and II, 248500 | MAN2B1, MANB |
| (3) | |
| Mannosidosis, beta, 248510 (3) | MANBA, MANB1 |
| Maple syrup urine disease, type Ia, 248600 | BCKDHA, MSUD1 |
| (3) | |
| Maple syrup urine disease, type Ib (3) | BCKDHB, E1B |
| Maple syrup urine disease, type II (3) | DBT, BCATE2 |
| Maple syrup urine disease, type III, 248600 | DLD, LAD, PHE3 |
| (3) | |
| Marfan syndrome, 154700 (3) | FBN1, MFS1, WMS |
| Marfan syndrome, atypical (3) | COL1A2 |
| Maroteaux-Lamy syndrome, several forms | ARSB, MPS6 |
| (3) | |
| Marshall syndrome, 154780 (3) | COL11A1, STL2 |
| MASA syndrome, 303350 (3) | L1CAM, CAML1, HSAS1 |
| MASP2 deficiency (3) | MASP2 |
| MASS syndrome, 604308 (3) | FBN1, MFS1, WMS |
| Mast cell leukemia (3) | KIT, PBT |
| Mastocytosis with associated hematologic | KIT, PBT |
| disorder (3) | |
| Mast syndrome, 248900 (3) | ACP33, MAST, SPG21 |
| May-Hegglin anomaly, 155100 (3) | MYH9, MHA, FTNS, DFNA17 |
| McArdle disease, 232600 (3) | PYGM |
| McCune-Albright syndrome, 174800 (3) | GNAS, GNAS1, GPSA, POH, PHP1B, |
| | PHP1A, AHO |
| McKusick-Kaufman syndrome, 236700 (3) | MKKS, HMCS, KMS, MKS, BBS6 |
| McLeod syndrome (3) | XK |
| McLeod syndrome with neuroacanthosis (3) | XK |
| Medullary cystic kidney disease 2, 603860 | UMOD, HNFJ, FJHN, MCKD2, |
| (3) | ADMCKD2 |
| Medullary thyroid carcinoma, 155240 (3) | RET, MEN2A |
| Medullary thyroid carcinoma, familial, | NTRK1, TRKA, MTC |
| 155240 (3) | |
| Medulloblastoma, 155255 (3) | PTCH2 |
| Medulloblastoma, desmoplastic, 155255 (3) | SUFU, SUFUXL, SUFUH |
| Meesmann corneal dystrophy, 122100 (3) | KRT12 |
| Meesmann corneal dystrophy, 122100 (3) | KRT3 |
| Megakaryoblastic leukemia, acute (3) | MKL1, AMKL, MAL |
| Megalencephalic leukoencephalopathy with | MLC1, LVM, VL |
| subcortical cysts, 604004 (3) | |
| Megaloblastic anemia-1, Finnish type, | CUBN, IFCR, MGA1 |
| 261100 (3) | |
| Megaloblastic anemia-1, Norwegian type, | AMN |
| 261100 (3) | |
| Melanoma (3) | CDK4, CMM3 |
| Melanoma and neural system tumor | CDKN2A, MTS1, P16, MLM, CMM2 |
| syndrome, 155755 (3) | |
| Melanoma, cutaneous malignant, 2, 155601 | CDKN2A, MTS1, P16, MLM, CMM2 |
| (3) | |
| Melanoma, cutaneous malignant, | XRCC3 |
| susceptibility to (3) | |
| Melanoma, malignant sporadic (3) | STK11, PJS, LKB1 |
| Melanoma, melignant, somatic (3) | BRAF |
| Meleda disease, 248300 (3) | SLURP1, MDM |
| Melnick-Needles syndrome, 309350 (3) | FLNA, FLN1, ABPX, NHBP, OPD1, |
| | OPD2, FMD, MNS |
| Melorheostosis with osteopoikilosis, 155950 | LEMD3, MAN1 |
| (3) | |
| Memory impairment, susceptibility to (3) | BDNF |
| Meniere disease 156000 (3) ( ) | COCH, DFNA9 |
| Meningioma, 607174 (3) | MN1, MGCR |
| Meningioma, 607174 (3) | PTEN, MMAC1 |
| Meningioma, NF2-related, somatic, 607174 | NF2 |
| (3) | |
| Meningioma, SIS-related (3) | PDGFB, SIS |
| Meningococcal disease, susceptibility to (3) | MBL2, MBL, MBP1 |
| Menkes disease, 309400 (3) | ATP7A, MNK, MK, OHS |
| Mental retardation, nonsyndromic, | PRSS12, BSSP3 |
| autosomal recessive, 249500 (3) | |
| Mental retardation, nonsyndromic, | CRBN, MRT2A |
| autosomal recessive, 2A, 607417 (3) | |
| Mental retardation, X-linked, 300425 (3) | NLGN4, KIAA1260, AUTSX2 |
| Mental retardation, X-linked, 300458 (3) | MECP2, RTT, PPMX, MRX16, MRX79 |
| Mental retardation, X-linked 30, 300558 (3) | PAK3, MRX30, MRX47 |
| Mental retardation, X-linked, 34, 300426 (3) | IL1RAPL, MRX34 |
| Mental retardation, X-linked 36, 300430 (3) | ARX, ISSX, PRTS, MRXS1, MRX36, |
| | MRX54 |
| Mental retardation, X-linked (3) | SLC6A8, CRTR |
| Mental retardation, X-linked-44, 300501 (3) | FTSJ1, JM23, SPB1, MRX44, MRX9 |
| Mental retardation, X-linked 45, 300498 (3) | ZNF81, MRX45 |
| Mental retardation, X-linked 54, 300419 (3) | ARX, ISSX, PRTS, MRXS1, MRX36, |
| | MRX54 |
| Mental retardation, X-linked 58, 300218 (3) | TM4SF2, MXS1, A15 |
| Mental retardation, X-linked, 60, 300486 (3) | OPHN1 |
| Mental retardation, X-linked-9, 309549 (3) | FTSJ1, JM23, SPB1, MRX44, MRX9 |
| Mental retardation, X-linked, FRAXE type | FMR2, FRAXE, MRX2 |
| (3) | |
| Mental retardation, X-linked, JARID1C- | SMCX, MRXJ, DXS1272E, XE169, |
| related, 300534 (3) | JARID1C |
| Mental retardation, X-linked nonspecific, | GDI1, RABGD1A, MRX41, MRX48 |
| 309541 (3) | |
| Mental retardation, X-linked nonspecific, 63, | FACL4, ACS4, MRX63 |
| 300387 (3) | |
| Mental retardation, X-linked nonspecific, | RPS6KA3, RSK2, MRX19 |
| type 19 (3) | |
| Mental retardation, X-linked nonspecific, | ARHGEF6, MRX46, COOL2 |
| type 46, 300436 (3) | |
| Mental retardation, X-linked nonsyndromic | AGTR2 |
| (3) | |
| Mental retardation, X-linked nonsyndromic | FGD1, FGDY, AAS |
| (3) | |
| Mental retardation, X-linked nonsyndromic | ZNF41 |
| (3) | |
| Meesmann corneal dystrophy, 122100 (3) | KRT12 |
| Meesmann corneal dystrophy, 122100 (3) | KRT3 |
| Megakaryoblastic leukemia, acute (3) | MKL1, AMKL, MAL |
| Megalencephalic leukoencephalopathy with | MLC1, LVM, VL |
| subcortical cysts, 604004 (3) | |
| Megaloblastic anemia-1, Finnish type, | CUBN, IFCR, MGA1 |
| 261100 (3) | |
| Megaloblastic anemia-1, Norwegian type, | AMN |
| 261100 (3) | |
| Melanoma (3) | CDK4, CMM3 |
| Melanoma and neural system tumor | CDKN2A, MTS1, P16, MLM, CMM2 |
| syndrome, 155755 (3) | |
| Melanoma, cutaneous malignant, 2, 155601 | CDKN2A, MTS1, P16, MLM, CMM2 |
| (3) | |
| Melanoma, cutaneous malignant, | XRCC3 |
| susceptibility to (3) | |
| Melanoma, malignant sporadic (3) | STK11, PJS, LKB1 |
| Melanoma, melignant, somatic (3) | BRAF |
| Meleda disease, 248300 (3) | SLURP1, MDM |
| Melnick-Needles syndrome, 309350 (3) | FLNA, FLN1, ABPX, NHBP, OPD1, |
| | OPD2, FMD, MNS |
| Melorheostosis with osteopoikilosis, 155950 | LEMD3, MAN1 |
| (3) | |
| Memory impairment, susceptibility to (3) | BDNF |
| Meniere disease 156000 (3) ( ) | COCH, DFNA9 |
| Meningioma, 607174 (3) | MN1, MGCR |
| Meningioma, 607174 (3) | PTEN, MMAC1 |
| Meningioma, NF2-related, somatic, 607174 | NF2 |
| (3) | |
| Meningioma, SIS-related (3) | PDGFB, SIS |
| Meningococcal disease, susceptibility to (3) | MBL2, MBL, MBP1 |
| Menkes disease, 309400 (3) | ATP7A, MNK, MK, OHS |
| Mental retardation, nonsyndromic, | PRSS12, BSSP3 |
| autosomal recessive, 249500 (3) | |
| Mental retardation, nonsyndromic, | CRBN, MRT2A |
| autosomal recessive, 2A, 607417 (3) | |
| Mental retardation, X-linked, 300425 (3) | NLGN4, KIAA1260, AUTSX2 |
| Mental retardation, X-linked, 300458 (3) | MECP2, RTT, PPMX, MRX16, MRX79 |
| Mental retardation, X-linked 30, 300558 (3) | PAK3, MRX30, MRX47 |
| Mental retardation, X-linked, 34, 300426 (3) | IL1RAPL, MRX34 |
| Mental retardation, X-linked 36, 300430 (3) | ARX, ISSX, PRTS, MRXS1, MRX36, |
| | MRX54 |
| Mental retardation, X-linked (3) | SLC6A8, CRTR |
| Mental retardation, X-linked-44, 300501 (3) | FTSJ1, JM23, SPB1, MRX44, MRX9 |
| Mental retardation, X-linked 45, 300498 (3) | ZNF81, MRX45 |
| Mental retardation, X-linked 54, 300419 (3) | ARX, ISSX, PRTS, MRXS1, MRX36, |
| | MRX54 |
| Mental retardation, X-linked 58, 300218 (3) | TM4SF2, MXS1, A15 |
| Mental retardation, X-linked, 60, 300486 (3) | OPHN1 |
| Mental retardation, X-linked-9, 309549 (3) | FTSJ1, JM23, SPB1, MRX44, MRX9 |
| Mental retardation, X-linked, FRAXE type | FMR2, FRAXE, MRX2 |
| (3) | |
| Mental retardation, X-linked, JARID1C- | SMCX, MRXJ, DXS1272E, XE169, |
| related, 300534 (3) | JARID1C |
| Mental retardation, X-linked nonspecific, | GDI1, RABGD1A, MRX41, MRX48 |
| 309541 (3) | |
| Mental retardation, X-linked nonspecific, 63, | FACL4, ACS4, MRX63 |
| 300387 (3) | |
| Mental retardation, X-linked nonspecific, | RPS6KA3, RSK2, MRX19 |
| type 19 (3) | |
| Mental retardation, X-linked nonspecific, | ARHGEF6, MRX46, COOL2 |
| type 46, 300436 (3) | |
| Mental retardation, X-linked nonsyndromic | AGTR2 |
| (3) | |
| Mental retardation, X-linked nonsyndromic | FGD1, FGDY, AAS |
| (3) | |
| Mental retardation, X-linked nonsyndromic | ZNF41 |
| (3) | |
| Mental retardation, X-linked nonsyndromic, | DLG3, NEDLG, SAP102, MRX |
| DLGS-related (3) | |
| Mental retardation, X-linked, Snyder- | SMS, SRS, MRSR |
| Robinson type, 309583 (3) | |
| Mental retardation, X-linked, with isolated | SOX3, MRGH |
| growth hormone deficiency, 300123 (3) | |
| Mental retardation, X-linked, with | MECP2, RTT, PPMX, MRX16, MRX79 |
| progressive spasticity, 300279 (3) | |
| Mental retardation, X-linked, with seizures | SLC6A8, CRTR |
| and carrier manifestations, 300397 (3) | |
| Mephenytoin poor metabolizer (3) | CYP2C, CYP2C19 |
| Merkel cell carcinoma, somatic (3) | SDHD, PGL1 |
| Mesangial sclerosis, isolated diffuse, | WT1 |
| 256370 (3) | |
| Mesothelioma (3) | BCL10 |
| Metachromatic leukodystrophy, 250100 (3) | ARSA |
| Metachromatic leukodystrophy due to | PSAP, SAP1 |
| deficiency of SAP-1 (3) | |
| Metaphyseal chondrodysplasia, Murk | PTHR1, PTHR |
| Jansen type, 156400 (3) | |
| Metaphyseal chondrodysplasia, Schmid | COL10A1 |
| type (3) | |
| Metaphyseal dysplasia without | RMRP, RMRPR, CHH |
| hypotrichosis, 250460 (3) | |
| Methemoglobinemia due to cytochrome b5 | CYB5 |
| deficiency (3) | |
| Methemoglobinemias, alpha-(3) | HBA1 |
| Methemoglobinemias, beta-(3) | HBB |
| Methemoglobinemia, type I (3) | DIA1 |
| Methemoglobinemia, type II (3) | DIA1 |
| Methionine adenosyltransferase deficiency, | MAT1A, MATA1, SAMS1 |
| autosomal recessive (3) | |
| Methylcobalamin deficiency, cbIG type, | MTR |
| 250940 (3) | |
| Methylmalonate semialdehyde | ALDH6A1, MMSDH |
| dehydrogenase deficiency (3) | |
| Methylmalonic aciduria, mut(0) type, 251000 | MUT, MCM |
| (3) | |
| Methylmalonic aciduria, vitamin B12- | MMAA |
| responsive, 251100 (3) | |
| Methylmalonic aciduria, vitamin B12- | MMAB |
| responsive, due to defect in synthesis of | |
| adenosylcobalamin, cbIB complementation | |
| type, 251110 (3) | |
| Mevalonicaciduria (3) | MVK, MVLK |
| MHC class II deficiency, complementation | RFXANK |
| group B, 209920 (3) | |
| Microcephaly, Amish type, 607196 (3) | SLC25A19, DNC, MUP1, MCPHA |
| Microcephaly, autosomal recessive 1, | MCPH1 |
| 251200 (3) | |
| Microcephaly, primary autosomal recessive, | CDK5RAP2, KIAA1633, MCPH3 |
| 3, 604804 (3) | |
| Microcephaly, primary autosomal recessive, | ASPM, MCPH5 |
| 5, 608716 (3) | |
| Microcephaly, primary autosomal recessive, | CEMPJ, CPAP, MCPH6 |
| 6, 608393 (3) | |
| Microcoria-congenital nephrosis syndrome, | LAMB2, LAMS |
| 609049 (3) | |
| Micropenis (3) | LHCGR |
| Microphthalmia, cataracts, and iris | CHX10, HOX10 |
| abnormalities (3) | |
| Microphthalmia, SIX6-related (3) | SIX6 |
| Microphthalmia with associated anomalies | BCOR, KIAA1575, MAA2, ANOP2 |
| 2, 300412 (3) | |
| Migraine, familial hemiplegic, 2, 602481 (3) | ATP1A2, FHM2, MHP2 |
| Migraine, resistance to, 157300 (3) | EDNRA |
| Migraine, susceptibility to, 157300 (3) | ESR1, ESR |
| Migraine without aura, susceptibility to, | TNF, TNFA |
| 157300 (3) | |
| Miller-Dieker lissencephaly, 247200 (3) | YWHAE, MDCR, MDS |
| Mitochondrial complex I deficiency, 252010 | NDUFS1 |
| (3) | |
| Mitochondrial complex I deficiency, 252010 | NDUFS2 |
| (3) | |
| Mitochondrial complex I deficiency, 252010 | NDUFS4, AQDQ |
| (3) | |
| Mitochondrial complex I deficiency, 252010 | NDUFV1, UQOR1 |
| (3) | |
| Mitochondrial complex III deficiency, 124000 | BCS1L, FLNMS, GRACILE |
| (3) | |
| Mitochondrial complex III deficiency, 124000 | UQCRB, UQBP, QPC |
| (3) | |
| Mitochondrial DNA depletion myopathy, | TK2 |
| 251880 (3) | |
| Mitochondrial DNA depletion syndrome, | SUCLA2 |
| 251880 (3) | |
| Mitochondrial DNA-depletion syndrome, | DGUOK, DGK |
| hepatocerebral form, 251880 (3) | |
| Mitochondrial myopathy and sideroblastic | PUS1, MLASA |
| anemia, 600462 (3) | |
| Mitochondrial respiratory chain complex II | SDHA, SDH2, SDHF |
| deficiency, 252011 (3) | |
| Miyoshi myopathy, 254130 (3) | DYSF, LGMD2B |
| MODY5 with nephron agenesis (3) | TCF2, HNF2 |
| MODY5 with non-diabetic renal disease and | TCF2, HNF2 |
| Mullerian aplasia (3) | |
| MODY, one form, 125850 (3) | INS |
| MODY, type I, 125850 (3) | HNF4A, TCF14, MODY1 |
| MODY, type II, 125851 (3) | GCK |
| MODY, type III, 600496 (3) | TCF1, HNF1A, MODY3 |
| MODY, type IV (3) | IPF1 |
| MODY, type V, 604284 (3) | TCF2, HNF2 |
| Mohr-Tranebjaerg syndrome, 304700 (3) | TIMM8A, DFN1, DDP, MTS, DDP1 |
| Molybdenum cofactor deficiency, type A, | MOCS1, MOCOD |
| 252150 (3) | |
| Molybdenum cofactor deficiency, type B, | MOCS2, MPTS |
| 252150 (3) | |
| Molybdenum cofactor deficiency, type C, | GPH, KIAA1385, GEPH |
| 252150 (3) | |
| Monilethrix, 158000 (3) | KRTHB1, HB1 |
| Monilethrix, 158000 (3) | KRTHB6, HB6 |
| Morning glory disc anomaly (3) | PAX6, AN2, MGDA |
| Mowat-Wilson syndrome, 235730 (3) | ZFHX1B, SMADIP1, SIP1 |
| Moyamoya disease 3 (3) | MYMY3 |
| Muckle-Wells syndrome, 191900 (3) | CIAS1,C1orf7, FCU, FCAS |
| Mucoepidermoid salivary gland carcinoma | MAML2, MAM3 |
| (3) | |
| Mucoepidermoid salivary gland carcinoma | MECT1, KIAA0616 |
| (3) | |
| Mucolipidosis IIIA, 252600 (3) | GNPTAB, GNPTA |
| Mucolipidosis IIIC, 252605 (3) | GNPTAG |
| Mucolipidosis IV, 252650 (3) | MCOLN1, ML4 |
| Mucopolysaccharidosis Ih, 607014 (3) | IDUA, IDA |
| Mucopolysaccharidosis Ih/s, 607015 (3) | IDUA, IDA |
| Mucopolysaccharidosis II (3) | IDS, MPS2, SIDS |
| Mucopolysaccharidosis Is, 607016 (3) | IDUA, IDA |
| Mucopolysaccharidosis IVA (3) | GALNS, MPS4A |
| Mucopolysaccharidosis IVB (3) | GLB1 |
| Mucopolysaccharidosis type IIID, 252940 | GNS, G6S |
| (3) | |
| Mucopolysaccharidosis type IX, 601492 (3) | HYAL1 |
| Mucopolysaccharidosis VII (3) | GUSB, MPS7 |
| Muenke syndrome, 602849 (3) | FGFR3, ACH |
| Muir-Torre syndrome, 158320 (3) | MLH1, COCA2, HNPCC2 |
| Muir-Torre syndrome, 158320 (3) | MSH2, COCA1, FCC1, HNPCC1 |
| Mulibrey nanism, 253250 (3) | TRIM37, MUL, KIAA0898 |
| Multiple cutaneous and uterine | FH |
| leiomyomata, 150800 (3) | |
| Multiple endocrine neoplasia I (3) | MEN1 |
| Multiple endocrine neoplasia IIA, 171400 (3) | RET, MEN2A |
| Multiple endocrine neoplasia IIB, 162300 (3) | RET, MEN2A |
| Multiple malignancy syndrome (3) | TP53, P53, LFS1 |
| Multiple myeloma (3) | IRF4, LSIRF |
| Multiple myeloma, resistance to, 254500 (3) | LIG4 |
| Multiple sclerosis, susceptibility to, 126200 | MHC2TA, C2TA |
| (3) | |
| Multiple sclerosis, susceptibility to, 126200 | PTPRC, CD45, LCA |
| (3) | |
| Multiple sulfatase deficiency, 272200 (3) | SUMF1, FGE |
| Muscle-eye-brain disease, 253280 (3) | POMGNT1, MEB |
| Muscle glycogenosis (3) | PHKA1 |
| Muscle hypertrophy (3) | GDF8, MSTN |
| Muscular dystrophy, congenital, 1C (3) | FKRP, MDC1C, LGMD2I |
| Muscular dystrophy, congenital, due to | LAMA2, LAMM |
| partial LAMA2 deficiency, 607855 (3) | |
| Muscular dystrophy, congenital merosin- | LAMA2, LAMM |
| deficient, 607855 (3) | |
| Muscular dystrophy, congenital, type 1D, | LARGE, KIAA0609, MDC1D |
| 608840 (3) | |
| Muscular dystrophy, Fukuyama congenital, | FCMD |
| 253800 (3) | |
| Muscular dystrophy, limb-girdle, type 1A, | TTID, MYOT |
| 159000 (3) | |
| Muscular dystrophy, limb-girdle, type 2A, | CAPN3, CANP3 |
| 253600 (3) | |
| Muscular dystrophy, limb-girdle, type 2B, | DYSF, LGMD2B |
| 253601 (3) | |
| Muscular dystrophy, limb-girdle, type 2C, | SGCG, LGMD2C, DMDA1, SCG3 |
| 253700 (3) | |
| Muscular dystrophy, limb-girdle, type 2D, | SGCA, ADL, DAG2, LGMD2D, DMDA2 |
| 608099 (3) | |
| Muscular dystrophy, limb-girdle, type 2E, | SGCB, LGMD2E |
| 604286 (3) | |
| Muscular dystrophy, limb-girdle, type 2F, | SGCD, SGD, LGMD2F, CMD1L |
| 601287 (3) | |
| Muscular dystrophy, limb-girdle, type 2G, | TCAP, LGMD2G, CMD1N |
| 601954 (3) | |
| Muscular dystrophy, limb-girdle, type 2H, | TRIM32, HT2A, LGMD2H |
| 254110 (3) | |
| Muscular dystrophy, limb-girdle, type 2I, | FKRP, MDC1C, LGMD2I |
| 607155 (3) | |
| Muscular dystrophy, limb-girdle, type 2J, | TTN, CMD1G, TMD, LGMD2J |
| 608807 (3) | |
| Muscular dystrophy, limb-girdle, type 2K, | POMT1 |
| 609308 (3) | |
| Muscular dystrophy, limb-girdle, type 1C, | CAV3, LGMD1C |
| 607801 (3) | |
| Muscular dystrophy, rigid spine, 1, 602771 | SEPN1, SELN, RSMD1 |
| (3) | |
| Muscular dystrophy with epidermolysis | PLEC1, PLTN, EBS1 |
| bullosa simplex, 226670 (3) | |
| Myasthenia, familial infantile, 1, 605809 (3) | CMS1A1, FIM1 |
| Myasthenic syndrome (3) | SCN4A, HYPP, NAC1A |
| Myasthenic syndrome, congenital, | CHRNB1, ACHRB, SCCMS, CMS2A, |
| associated with acetylcholine receptor | CMS1D |
| deficiency, 608931 (3) | |
| Myasthenic syndrome, congenital, | CHRNE, SCCMS, CMS2A, FCCMS, |
| associated with acetylcholine receptor | CMS1E, CMS1D |
| deficiency, 608931 (3) | |
| Myasthenic syndrome, congenital, | RAPSN, CMS1D, CMS1E |
| associated with acetylcholine receptor | |
| deficiency, 608931 (3) | |
| Myasthenic syndrome, congenital, | CHAT, CMS1A2 |
| associated with episodic apnea, 254210 (3) | |
| Myasthenic syndrome, congenital, | RAPSN, CMS1D, CMS1E |
| associated with facial dysmorphism and | |
| acetylcholine receptor deficiency, 608931 (3) | |
| Myasthenic syndrome, fast-channel | CHRNA1, ACHRD, CMS2A, SCCMS, |
| congenital, 608930 (3) | FCCMS |
| Myasthenic syndrome, fast-channel | CHRND, ACHRD, SCCMS, CMS2A, |
| congenital, 608930 (3) | FCCMS |
| Myasthenic syndrome, fast-channel | CHRNE, SCCMS, CMS2A, FCCMS, |
| congenital, 608930 (3) | CMS1E, CMS1D |
| Myasthenic syndrome, slow-channel | CHRNA1, ACHRD, CMS2A, SCCMS, |
| congenital, 601462 (3) | FCCMS |
| Myasthenic syndrome, slow-channel | CHRNB1, ACHRB, SCCMS, CMS2A, |
| congenital, 601462 (3) | CMS1D |
| Myasthenic syndrome, slow-channel | CHRND, ACHRD, SCCMS, CMS2A, |
| congenital, 601462 (3) | FCCMS |
| Myasthenic syndrome, slow-channel | CHRNE, SCCMS, CMS2A, FCCMS, |
| congenital, 601462 (3) | CMS1E, CMS1D |
| Mycobacterial and salmonella infections, | IL12RB1 |
| susceptibility to, 209950 (3) | |
| Mycobacterial infection, atypical, familial | IFNGR1 |
| disseminated, 209950 (3) | |
| Mycobacterial infection, atypical, familial | IFNGR2, IFNGT1, IFGR2 |
| disseminated, 209950 (3) | |
| Mycobacterial infection, atypical, familial | STAT1 |
| disseminated, 209950 (3) | |
| Mycobacterium tuberculosis, suceptibility to | NRAMP1, NRAMP |
| infection by, 607948 (3) | |
| Myelodysplasia syndrome-1 (3) | MDS1 |
| Myelodysplastic syndrome (3) | FACL6, ACS2 |
| Myelodysplastic syndrome, preleukemic (3) | IRF1, MAR |
| Myelofibrosis, idiopathic, 254450 (3) | JAK2 |
| Myelogenous leukemia, acute (3) | FACL6, ACS2 |
| Myelogenous leukemia, acute (3) | IRF1, MAR |
| Myeloid leukemia, acute, M4Eo subtype (3) | CBFB |
| Myeloid malignancy, predisposition to (3) | CSF1R, FMS |
| Myelokathexis, isolated (3) | CXCR4, D2S201E, NPY3R, WHIM |
| Myelomonocytic leukemia, chronic (3) | PDGFRB, PDGFR |
| Myeloperoxidase deficiency, 254600 (3) | MPO |
| Myeloproliferative disorder with eosinophilia, | PDGFRB, PDGFR |
| 131440 (3) | |
| Myoadenylate deaminase deficiency (3) | AMPD1 |
| Myocardial infarction, decreased | F7 |
| susceptibility to (3) | |
| Myocardial infarction susceptibility (3) | APOE, AD2 |
| Myocardial infarction, susceptibility to (3) | ACE, DCP1, ACE1 |
| Myocardial infarction, susceptibility to (3) | ALOX5AP, FLAP |
| Myocardial infarction, susceptibility to (3) | LGALS2 |
| Myocardial infarction, susceptibility to (3) | LTA, TNFB |
| Myocardial infarction, susceptibility to (3) | OLR1, LOX1 |
| Myocardial infarction, susceptibility to (3) | THBD, THRM |
| Myocardial infarction, susceptibility to, | GCLM, GLCLR |
| 608446 (3) | |
| Myocardial infarction, susceptibility to, | TNFSF4, GP34, OX4OL |
| 608446 (3) | |
| Myoclonic epilepsy, juvenile, 1, 254770 (3) | EFHC1, FLJ10466, EJM1 |
| Myoclonic epilepsy, severe, of infancy, | GABRG2, GEFSP3, CAE2, ECA2 |
| 607208 (3) | |
| Myoclonic epilepsy with mental retardation | ARX, ISSX, PRTS, MRXS1, MRX36, |
| and spasticity, 300432 (3) | MRX54 |
| Myoglobinuria/hemolysis due to PGK | PGK1, PGKA |
| deficiency (3) | |
| Myokymia with neonatal epilepsy, 606437 | KCNQ2, EBN1 |
| (3) | |
| Myoneurogastrointestinal | ECGF1 |
| encephalomyopathy syndrome, 603041 (3) | |
| Myopathy, actin, congenital, with cores (3) | ACTA1, ASMA, NEM3, NEM1 |
| Myopathy, actin, congenital, with excess of | ACTA1, ASMA, NEM3, NEM1 |
| thin myofilaments, 161800 (3) | |
| Myopathy, cardioskeletal, desmin-related, | CRYAB, CRYA2, CTPP2 |
| with cataract, 608810 (3) | |
| Myopathy, centronuclear, 160150 (3) | MYF6 |
| Myopathy, congenital (3) | ITGA7 |
| Myopathy, desmin-related, cardioskeletal, | DES, CMD1I |
| 601419 (3) | |
| Myopathy, distal, with anterior tibial onset, | DYSF, LGMD2B |
| 606768 (3) | |
| Myopathy, distal, with decreased caveolin 3 | CAV3, LGMD1C |
| (3) | |
| Myopathy due to CPT II deficiency, 255110 | CPT2 |
| (3) | |
| Myopathy due to phosphoglycerate mutase | PGAM2, PGAMM |
| deficiency (3) | |
| Myopathy, Laing distal, 160500 (3) | MYH7, CMH1, MPD1 |
| Myopathy, myosin storage, 608358 (3) | MYH7, CMH1, MPD1 |
| Myopathy, nemaline, 3, 161800 (3) | ACTA1, ASMA, NEM3, NEM1 |
| Myotilinopathy, 609200 (3) | TTID, MYOT |
| Myotonia congenita, atypical, | SCN4A, HYPP, NAC1A |
| acetazolamide-responsive, 608390 (3) | |
| Myotonia congenita, dominant, 160800 (3) | CLCN1 |
| Myotonia congenita, recessive, 255700 (3) | CLCN1 |
| Myotonia levior, recessive (3) | CLCN1 |
| Myotonic dystrophy, 160900 (3) | DMPK, DM, DMK |
| Myotonic dystrophy, type 2, 602668 (3) | ZNF9, CNBP1, DM2, PROMM |
| Myotubular myopathy, X-linked, 310400 (3) | MTM1, MTMX |
| Myxoid liposarcoma (3) | DDIT3, GADD153, CHOP10 |
| Myxoma, intracardiac, 255960 (3) | PRKAR1A, TSE1, CNC1, CAR |
| N-acetylglutamate synthase deficiency, | NAGS |
| 237310 (3) | |
| Nail-patella syndrome, 161200 (3) | LMX1B, NPS1 |
| Nail-patella syndrome with open-angle | LMX1B, NPS1 |
| glaucoma, 137750 (3) | |
| Nance-Horan syndrome, 302350 (3) | NHS |
| Narcolepsy, 161400 (3) | HCRT, OX |
| Nasopharyngeal carcinoma, 161550 (3) | TP53, P53, LFS1 |
| Nasu-Hakola disease, 221770 (3) | TREM2 |
| Nasu-Hakola disease, 221770 (3) | TYROBP, PLOSL, DAP12 |
| Naxos disease, 601214 (3) | JUP, DP3, PDGB |
| Nemaline myopathy, 161800 (3) | TPM2, TMSB, AMCD1, DA1 |
| Nemaline myopathy 1, autosomal dominant, | TPM3, NEM1 |
| 161800 (3) | |
| Nemaline myopathy 2, autosomal recessive, | NEB, NEM2 |
| 256030 (3) | |
| Nemaline myopathy, Amish type, 605355 | TNNT1, ANM |
| (3) | |
| Neonatal ichthyosis-sclerosing cholangitis | CLDN1, SEMP1 |
| syndrome, 607626 (3) | |
| Nephrogenic syndrome of inappropriate | AVPR2, DIR, DI1, ADHR |
| antidiuresis, 300539 (3) | |
| Nephrolithiasis, type I, 310468 (3) | CLCN5, CLCK2, NPHL2, DENTS |
| Nephrolithiasis, uric acid, susceptibility to, | ZNF365, UAN |
| 605990 (3) | |
| Nephronophthisis 2, infantile, 602088 (3) | INVS, INV, NPHP2, NPH2 |
| Nephronophthisis 4, 606966 (3) | NPHP4, SLSN4 |
| Nephronophthisis, adolescent, 604387 (3) | NPHP3, NPH3 |
| Nephronophthisis, juvenile, 256100 (3) | NPHP1, NPH1, SLSN1 |
| Nephropathy, chronic hypocomplementemic | HF1, CFH, HUS |
| (3) | |
| Nephropathy with pretibial epidermolysis | CD151, PETA3, SFA1 |
| bullosa and deafness, 609057 (3) | |
| Nephrosis-1, congenital, Finnish type, | NPHS1, NPHN |
| 256300 (3) | |
| Nephrotic syndrome, steroid-resistant, | PDCN, NPHS2, SRN1 |
| 600995 (3) | |
| Netherton syndrome, 256500 (3) | SPINK5, LEKTI |
| Neural tube defects, maternal risk of, | MTHFD, MTHFC |
| 601634 (3) | |
| Neuroblastoma, 256700 (3) | NME1, NM23 |
| Neuroblastoma, 256700 (3) | PMX2B, NBPHOX, PHOX2B |
| Neurodegeneration, pantothenate kinase- | PANK2, NBIA1, PKAN, HARP |
| associated, 234200 (3) | |
| Neuroectodermal tumors, supratentorial | PMS2, PMSL2, HNPCC4 |
| primitive, with cafe-au-lait spots, 608623 (3) | |
| Neurofibromatosis, familial spinal, 162210 | NF1, VRNF, WSS, NFNS |
| (3) | |
| Neurofibromatosis-Noonan syndrome, | NF1, VRNF, WSS, NFNS |
| 601321 (3) | |
| Neurofibromatosis, type 1 (3) | NF1, VRNF, WSS, NFNS |
| Neurofibromatosis, type 2, 101000 (3) | NF2 |
| Neurofibromatosis, type 1, with leukemia, | MSH2, COCA1, FCC1, HNPCC1 |
| 162200 (3) | |
| Neurofibrosarcoma (3) | MXI1 |
| Neuropathy, congenital hypomyelinating, 1, | EGR2, KROX20 |
| 605253 (3) | |
| Neuropathy, congenital hypomyelinating, | MPZ, CMT1B, CMTDI3, CHM, DSS |
| 605253 (3) | |
| Neuropathy, distal hereditary motor, 608634 | HSPB1, HSP27, CMT2F |
| (3) | |
| Neuropathy, distal hereditary motor, type II, | HSPB8, H11, E2IG1, DHMN2 |
| 158590 (3) | |
| Neuropathy, hereditary sensory and | SPTLC1, LBC1, SPT1, HSN1, HSAN |
| autonomic, type 1, 162400 (3) | |
| Neuropathy, hereditary sensory and | NGFB, HSAN5 |
| autonomic, type V, 608654 (3) | |
| Neuropathy, hereditary sensory, type II, | HSN2 |
| 201300 (3) | |
| Neuropathy, recurrent, with pressure | PMP22, CMT1A, CMT1E, DSS |
| palsies, 162500 (3) | |
| Neutropenia, alloimmune neonatal (3) | FCGR3A, CD16, IGFR3 |
| Neutropenia, congenital, 202700 (3) | ELA2 |
| Neutropenia, severe congenital, 202700 (3) | GFI1, ZNF163 |
| Neutropenia, severe congenital, X-linked, | WAS, IMD2, THC |
| 300299 (3) | |
| Neutrophil immunodeficiency syndrome, | RAC2 |
| 608203 (3) | |
| Nevo syndrome, 601451 (3) | PLOD, PLOD1 |
| Nevus, epidermal, epidermolytic | KRT10 |
| hyperkeratotic type, 600648 (3) | |
| Newfoundland rod-cone dystrophy, 607476 | RLBP1 |
| (3) | |
| Nicotine addiction, protection from (3) | CYP2A6, CYP2A3, CYP2A, P450C2A |
| Nicotine addiction, susceptibility to, 188890 | CHRNA4, ENFL1 |
| (3) | |
| Nicotine dependence, susceptibility to, | GPR51, GABBR2 |
| 188890 (3) | |
| Niemann-Pick disease, type A, 257200 (3) | SMPD1, NPD |
| Niemann-Pick disease, type B, 607616 (3) | SMPD1, NPD |
| Niemann-Pick disease, type C1, 257220 (3) | NPC1, NPC |
| Niemann-pick disease, type C2, 607625 (3) | NPC2, HE1 |
| Niemann-Pick disease, type D, 257220 (3) | NPC1, NPC |
| Night blindness, congenital stationary (3) | GNAT1 |
| Night blindness, congenital stationary, type | CSNB1, NYX |
| 1, 310500 (3) | |
| Night blindness, congenital stationary, type | PDE6B, PDEB, CSNB3 |
| 3, 163500 (3) | |
| Night blindness, congenital stationary, X- | CACNA1F, CSNB2 |
| linked, type 2, 300071 (3) | |
| Night blindness, congenital stationery, | RHO, RP4, OPN2 |
| rhodopsin-related (3) | |
| Nijmegen breakage syndrome, 251260 (3) | NBS1, NBS |
| Nonaka myopathy, 605820 (3) | GNE, GLCNE, IBM2, DMRV, NM |
| Noncompaction of left ventricular | TAZ, EFE2, BTHS, CMD3A, LVNCX |
| myocardium, isolated, 300183 (3) | |
| Non-Hodgkin lymphoma, somatic, 605027 | CASP10, MCH4, ALPS2 |
| (3) | |
| Nonsmall cell lung cancer (3) | IRF1, MAR |
| Nonsmall cell lung cancer, response to | EGFR |
| tyrosine kinase inhibitor in, 211980 (3) | |
| Nonsmall cell lung cancer, somatic (3) | BRAF |
| Noonan syndrome 1, 163950 (3) | PTPN11, PTP2C, SHP2, NS1 |
| Norrie disease (3) | NDP, ND |
| Norum disease, 245900 (3) | LCAT |
| Norwalk virus infection, resistance to (3) | FUT2, SE |
| Nucleoside phosphorylase deficiency, | NP |
| immunodeficiency due to (3) | |
| Obesity, adrenal insufficiency, and red hair | POMC |
| (3) | |
| Obesity, autosomal dominant, 601665 (3) | MC4R |
| Obesity, hyperphagia, and developmental | AKR1C2, DDH2, DD2, HAKRD |
| delay (3) | |
| Obesity, hyperphagia, and developmental | NTRK2, TRKB |
| delay (3) | |
| Obesity, late-onset, 601665 (3) | AGRP, ART, AGRT |
| Obesity, mild, early-onset, 601665 (3) | NR0B2, SHP |
| Obesity, morbid, with hypogonadism (3) | LEP, OB |
| Obesity, morbid, with hypogonadism (3) | LEPR, OBR |
| Obesity, resistance to (3) | PPARG, PPARG1, PPARG2 |
| Obesity, severe, 601665 (3) | PPARG, PPARG1, PPARG2 |
| Obesity, severe, 601665 (3) | SIM1 |
| Obesity, severe, and type II diabetes, | UCP3 |
| 601665 (3) | |
| Obesity, severe, due to leptin deficiency (3) | LEP, OB |
| Obesity, severe, susceptibility to, 601665 (3) | MC3R |
| Obesity, susceptibility to, 300306 (3) | SLC6A14, OBX |
| Obesity, susceptibility to, 601665 (3) | ADRB2 |
| Obesity, susceptibility to, 601665 (3) | ADRB3 |
| Obesity, susceptibility to, 601665 (3) | CART |
| Obesity, susceptibility to, 601665 (3) | ENPP1, PDNP1, NPPS, M6S1, PCA1 |
| Obesity, susceptibility to, 601665 (3) | GHRL |
| Obesity, susceptibility to, 601665 (3) | UCP1 |
| Obesity, susceptibility to, 601665 (3) | UCP2 |
| Obestiy with impaired prohormone | PCSK1, NEC1, PC1, PC3 |
| processing, 600955 (3) | |
| Obsessive-compulsive disorder 1, 164230 | SLC6A4, HTT, OCD1 |
| (3) | |
| Obsessive-compulsive disorder, protection | BDNF |
| against, 164230 (3) | |
| Obsessive-compulsive disorder, | HTR2A |
| susceptibility to, 164230 (3) | |
| Occipital horn syndrome, 304150 (3) | ATP7A, MNK, MK, OHS |
| Ocular albinism, Nettleship-Falls type (3) | OA1 |
| Oculocutaneous albinism, type II, modifier of | MC1R |
| (3) | |
| Oculocutaneous albinism, type IV, 606574 | MATP, AIM1 |
| (3) | |
| Oculodentodigital dysplasia, 164200 (3) | GJA1, CX43, ODDD, SDTY3, ODOD |
| Oculofaciocardiodental syndrome, 300166 | BCOR, KIAA1575, MAA2, ANOP2 |
| (3) | |
| Oculopharyngeal muscular dystorphy, | PABPN1, PABP2, PAB2 |
| 164300 (3) | |
| Oculopharyngeal muscular dystrophy, | PABPN1, PABP2, PAB2 |
| autosomal recessive, 257950 (3) | |
| Odontohypophosphatasia, 146300 (3) | ALPL, HOPS, TNSALP |
| Oguchi disease-1, 258100 (3) | SAG |
| Oguchi disease-2, 258100 (3) | RHOK, RK, GRK1 |
| Oligodendroglioma, 137800 (3) | PTEN, MMAC1 |
| Oligodontia, 604625 (3) | PAX9 |
| Oligodontia-colorectal cancer syndrome, | AXIN2 |
| 608615 (3) | |
| Omenn syndrome, 603554 (3) | DCLRE1C, ARTEMIS, SCIDA |
| Omenn syndrome, 603554 (3) | RAG1 |
| Omenn syndrome, 603554 (3) | RAG2 |
| Opitz G syndrome, type I, 300000 (3) | MID1, OGS1, BBBG1, FXY, OSX |
| Opremazole poor metabolizer (3) | CYP2C, CYP2C19 |
| Optic atrophy 1, 165500 (3) | OPA1, NTG, NPG |
| Optic atrophy and cataract, 165300 (3) | OPA3, MGA3 |
| Optic nerve coloboma with renal disease, | PAX2 |
| 120330 (3) | |
| Optic nerve hypoplasia/aplasia, 165550 (3) | PAX6, AN2, MGDA |
| Oral-facial-digital syndrome 1, 311200 (3) | OFD1, CXorf5 |
| Ornithine transcarbamylase deficiency, | OTC |
| 311250 (3) | |
| Orofacial cleft 6, 608864 (3) | IRF6, VWS, LPS, PIT, PPS, OFC6 |
| Orolaryngeal cancer, multiple, (3) | CDKN2A, MTS1, P16, MLM, CMM2 |
| Oroticaciduria (3) | UMPS, OPRT |
| Orthostatic intolerance, 604715 (3) | SLC6A2, NAT1, NET1 |
| OSMED syndrome, 215150 (3) | COL11A2, STL3, DFNA13 |
| Osseous heteroplasia, progressive, 166350 | GNAS, GNAS1, GPSA, POH, PHP1B, |
| (3) | PHP1A, AHO |
| Ossification of posterior longitudinal | ENPP1, PDNP1, NPPS, M6S1, PCA1 |
| ligament of spine, 602475 (3) | |
| Osteoarthritis, hand, susceptibility to, | MATN3, EDM5, HOA |
| 607850 (3) | |
| Osteoarthritis of hip, female-specific, | FRZB, FRZB1, SRFP3 |
| susceptibility to, 165720 (3) | |
| Osteoarthritis, susceptibility to, 165720 (3) | ASPN, PLAP1 |
| Osteoarthrosis, 165720 (3) | COL2A1 |
| Osteogenesis imperfecta, 3 clinical forms, | COL1A2 |
| 166200, 166210, 259420 (3) | |
| Osteogenesis imperfecta, type I, 166200 (3) | COL1A1 |
| Osteogenesis imperfecta, type II, 166210 | COL1A1 |
| (3) | |
| Osteogenesis imperfecta, type III, 259420 | COL1A1 |
| (3) | |
| Osteogenesis imperfecta, type IV, 166220 | COL1A1 |
| (3) | |
| Osteolysis, familial expansile, 174810 (3) | TNFRSF11A, RANK, ODFR, OFE |
| Osteolysis, idiopathic, Saudi type, 605156 | MMP2, CLG4A, MONA |
| (3) | |
| Osteopetrosis, autosomal dominant, type I, | LRP5, BMND1, LRP7, LR3, OPPG, |
| 607634 (3) | VBCH2 |
| Osteopetrosis, autosomal dominant, type II, | CLCN7, CLC7, OPTA2 |
| 166600 (3) | |
| Osteopetrosis, autosomal recessive, | OSTM1, GL |
| 259700 (3) | |
| Osteopetrosis, recessive, 259700 (3) | CLCN7, CLC7, OPTA2 |
| Osteopetrosis, recessive, 259700 (3) | TCIRG1, TIRC7, OC116, OPTB1 |
| Osteopoikilosis, 166700 (3) | LEMD3, MAN1 |
| Osteoporosis, 166710 (3) | COL1A1 |
| Osteoporosis, 166710 (3) | LRP5, BMND1, LRP7, LR3, OPPG, |
| | VBCH2 |
| Osteoporosis (3) | CALCA, CALC1 |
| Osteoporosis, hypophosphatemic, (3) | SLC17A2, NPT2 |
| Osteoporosis, idiopathic, 166710 (3) | COL1A2 |
| Osteoporosis, postmenopausal, | CALCR, CRT |
| susceptibility, 166710 (3) | |
| Osteoporosis-pseudoglioma syndrome, | LRP5, BMND1, LRP7, LR3, OPPG, |
| 259770 (3) | VBCH2 |
| Osteoporosis, susceptibility to, 166710 (3) | RIL |
| Osteosarcoma (3) | TP53, P53, LFS1 |
| Osteosarcoma, somatic, 259500 (3) | CHEK2, RAD53, CHK2, CDS1, LFS2 |
| Otopalatodigital syndrome, type I, 311300 | FLNA, FLN1, ABPX, NHBP, OPD1, |
| (3) | OPD2, FMD, MNS |
| Otopalatodigital syndrome, type II, 304120 | FLNA, FLN1, ABPX, NHBP, OPD1, |
| (3) | OPD2, FMD, MNS |
| Ovarian cancer (3) | BRCA1, PSCP |
| Ovarian cancer (3) | MSH2, COCA1, FCC1, HNPCC1 |
| Ovarian cancer, 604370 (3) | PIK3CA |
| Ovarian cancer, endometrial type (3) | MSH6, GTBP, HNPCC5 |
| Ovarian cancer, somatic, (3) | ERBB2, NGL, NEU, HER2 |
| Ovarian carcinoma (3) | CDH1, UVO |
| Ovarian carcinoma (3) | RRAS2, TC21 |
| Ovarian carcinoma, endometrioid type (3) | CTNNB1 |
| Ovarian dysgenesis 1, 233300 (3) | FSHR, ODG1 |
| Ovarian dysgenesis 2, 300510 (3) | BMP15, GDF9B, ODG2 |
| Ovarian hyperstimulation syndrome, | FSHR, ODG1 |
| gestational, 608115 (3) | |
| Ovarian sex cord tumors (3) | FSHR, ODG1 |
| Ovarioleukodystrophy, 603896 (3) | EIF2B2 |
| Ovarioleukodystrophy, 603896 (3) | EIF2B4 |
| Ovarioleukodystrophy, 603896 (3) | EIF2B5, LVWM, CACH, CLE |
| Pachyonychia congenita, Jackson-Lawler | KRT17, PC2, PCHC1 |
| type, 167210 (3) | |
| Pachyonychia congenita, Jackson-Lawler | KRT6B, PC2 |
| type, 167210 (3) | |
| Pachyonychia congenita, Jadassohn- | KRT16 |
| Lewandowsky type, 167200 (3) | |
| Pachyonychia congenita, Jadassohn- | KRT6A |
| Lewandowsky type, 167200 (3) | |
| Paget disease, juvenile, 239000 (3) | TNFRSF11B, OPG, OCIF |
| Paget disease of bone, 602080 (3) | SQSTM1, P62, PDB3 |
| Paget disease of bone, 602080 (3) | TNFRSF11A, RANK, ODFR, OFE |
| Pallidopontonigral degeneration, 168610 (3) | MAPT, MTBT1, DDPAC, MSTD |
| Pallister-Hall syndrome, 146510 (3) | GLI3, PAPA, PAPB, ACLS |
| Palmoplantar keratoderma, | KRT16 |
| nonepidermolytic, 600962 (3) | |
| Palmoplantar verrucous nevus, unilateral, | KRT16 |
| 144200 (3) | |
| Pancreatic agenesis, 260370 (3) | IPF1 |
| Pancreatic cancer, 260350 (3) | ARMET, ARP |
| Pancreatic cancer, 260350 (3) | BRCA2, FANCD1 |
| Pancreatic cancer, 260350 (3) | TP53, P53, LFS1 |
| Pancreatic cancer (3) | MADH4, DPC4, SMAD4, JIP |
| Pancreatic cancer/melanoma syndrome, | CDKN2A, MTS1, P16, MLM, CMM2 |
| 606719 (3) | |
| Pancreatic cancer, somatic (3) | ACVR1B, ACVRLK4, ALK4 |
| Pancreatic cancer, sporadic (3) | STK11, PJS, LKB1 |
| Pancreatic carcinoma, somatic, 260350 (3) | KRAS2, RASK2 |
| Pancreatic carcinoma, somatic (3) | RBBP8, RIM |
| Pancreatitis, hereditary, 167800 (3) | PRSS1, TRY1 |
| Pancreatitis, hereditary, 167800 (3) | SPINK1, PSTI, PCTT, TATI |
| Pancreatitis, idiopathic (3) | CFTR, ABCC7, CF, MRP7 |
| Papillary serous carcinoma of the | BRCA1, PSCP |
| peritoneum (3) | |
| Papillon-Lefevre syndrome, 245000 (3) | CTSC, CPPI, PALS, PLS, HMS |
| Paraganglioma, familial malignant, 168000 | SDHB, SDH1, SDHIP |
| (3) | |
| Paragangliomas, familial central nervous | SDHD, PGL1 |
| system, 168000 (3) | |
| Paragangliomas, familial nonchromaffin, 1, | SDHD, PGL1 |
| with and without deafness, 168000 (3) | |
| Paragangliomas, familial nonchromaffin, 3, | SDHC, PGL3 |
| 605373 (3) | |
| Paraganglioma, sporadic corotid body, | SDHD, PGL1 |
| 168000 (3) | |
| Paramyotonia congenita, 168300 (3) | SCN4A, HYPP, NAC1A |
| Parathyroid adenoma, sporadic (3) | MEN1 |
| Parathyroid adenoma with cystic changes, | HRPT2, C1orf28 |
| 145001 (3) | |
| Parathyroid carcinoma, 608266 (3) | HRPT2, C1orf28 |
| Parietal foramina 1, 168500 (3) | MSX2, CRS2, HOX8 |
| Parietal foramina 2, 168500 (3) | ALX4, PFM2, FPP |
| Parietal foramina with cleidocranial | MSX2, CRS2, HOX8 |
| dysplasia, 168550 (3) | |
| Parkes Weber syndrome, 608355 (3) | RASA1, GAP, CMAVM, PKWS |
| Parkinson disease, 168600 (3) | NR4A2, NURR1, NOT, TINUR |
| Parkinson disease, 168600 (3) | SNCAIP |
| Parkinson disease, 168600 (3) | TBP, SCA17 |
| Parkinson disease 4, autosomal dominant | SNCA, NACP, PARK1, PARK4 |
| Lewy body, 605543 (3) | |
| Parkinson disease 7, autosomal recessive | DJ1, PARK7 |
| early-onset, 606324 (3) | |
| Parkinson disease-8, 607060 (3) | LRRK2, PARK8 |
| Parkinson disease, early onset, 605909 (3) | PINK1, PARK6 |
| Parkinson disease, familial, 168600 (3) | UCHL1, PARK5 |
| Parkinson disease, familial, 168601 (3) | SNCA, NACP, PARK1, PARK4 |
| Parkinson disease, juvenile, type 2, 600116 | PRKN, PARK2, PDJ |
| (3) | |
| Parkinson disease, resistance to, 168600 | DBH |
| (3) | |
| Parkinson disease, susceptibility to, 168600 | NDUFV2 |
| (3) | |
| Paroxysmal nocturnal hemoglobinuria (3) | PIGA |
| Paroxysmal nonkinesigenic dyskinesia, | MR1, TAHCCP2, KIPP1184, BRP17, |
| 118800 (3) | PNKD, FPD1, PDC, DYT8 |
| Partington syndrome, 309510 (3) | ARX, ISSX, PRTS, MRXS1, MRX36, |
| | MRX54 |
| PCWH, 609136 (3) | SOX10, WS4 |
| Pelger-Huet anomaly, 169400 (3) | LBR, PHA |
| Pelizaeus-Merzbacher disease, 312080 (3) | PLP1, PMD |
| Pelizaeus-Merzbacher-like disease, | GJA12, CX47, PMLDAR |
| autosomal recessive, 608804 (3) | |
| Pendred syndrome, 274600 (3) | SLC26A4, PDS, DFNB4 |
| Perineal hypospadias (3) | AR, DHTR, TFM, SBMA, KD, SMAX1 |
| Periodic fever, familial, 142680 (3) | TNFRSF1A, TNFR1, TNFAR, FPF |
| Periodontitis, juvenile, 170650 (3) | CTSC, CPPI, PALS, PLS, HMS |
| Periventricular heterotopia with | ARFGEF2, BIG2 |
| microcephaly, 608097 (3) | |
| Peroxisomal biogenesis disorder, | PEX6, PXAAA1, PAF2 |
| complementation group 4 (3) | |
| Peroxisomal biogenesis disorder, | PEX6, PXAAA1, PAF2 |
| complementation group 6 (3) | |
| Peroxisome biogenesis factor 12 (3) | PEX12 |
| Persistent hyperinsulinemic hypoglycemia of | KCNJ11, BIR, PHHI |
| infancy, 256450 (3) | |
| Persistent Mullerian duct syndrome, type I, | AMH, MIF |
| 261550 (3) | |
| Persistent Mullerian duct syndrome, type II, | AMHR2, AMHR |
| 261550 (3) | |
| Peters anomaly, 603807 (3) | PAX6, AN2, MGDA |
| Peters anomaly, 604229 (3) | CYP1B1, GLC3A |
| Peutz-Jeghers syndrome, 175200 (3) | STK11, PJS, LKB1 |
| Pfeiffer syndrome, 101600 (3) | FGFR1, FLT2, KAL2 |
| Pfeiffer syndrome, 101600 (3) | FGFR2, BEK, CFD1, JWS |
| Phenylketonuria (3) | PAH, PKU1 |
| Phenylketonuria due to dihydropteridine | QDPR, DHPR |
| reductase deficiency (3) | |
| Phenylketonuria due to PTS deficiency (3) | PTS |
| Phenylthiocarbamide tasting, 171200 (3) | TAS2R38, T2R61, PTC |
| Pheochromocytoma, 171300 (3) | SDHD, PGL1 |
| Pheochromocytoma, 171300 (3) | VHL |
| Pheochromocytoma, extraadrenal, and | SDHB, SDH1, SDHIP |
| cervical paraganglioma, 115310 (3) | |
| Phosphoglycerate dehydrogenase | PHGDH |
| deficiency, 601815 (3) | |
| Phosphoribosyl pyrophosphate synthetase- | PRPS1 |
| related gout (3) | |
| Phosphorylase kinase deficiency of liver and | PHKB |
| muscle, autosomal recessive, 261750 (3) | |
| Phosphoserine phosphatase deficiency (3) | PSP |
| Pick disease, 172700 (3) | PSEN1, AD3 |
| Piebaldism (3) | KIT, PBT |
| Pigmentation of hair, skin, and eyes, | MATP, AIM1 |
| variation in (3) | |
| Pigmented adrenocortical disease, primary | PRKAR1A, TSE1, CNC1, CAR |
| isolated, 160980 (3) | |
| Pigmented paravenous chorioretinal | CRB1, RP12 |
| atrophy, 172870 (3) | |
| Pilomatricoma, 132600 (3) | CTNNB1 |
| Pituitary ACTH-secreting adenoma (3) | GNAI2, GNAI2B, GIP |
| Pituitary ACTH secreting adenoma (3) | GNAS, GNAS1, GPSA, POH, PHP1B, |
| | PHP1A, AHO |
| Pituitary adenoma, nonfunctioning (3) | THRA, ERBA1, THRA1 |
| Pituitary anomalies with holoprosencephaly- | GLI2 |
| like features (3) | |
| Pituitary hormone deficiency, combined (3) | POU1F1, PIT1 |
| Pituitary hormone deficiency, combined (3) | PROP1 |
| Pituitary hormone deficiency, combined, | HESX1, RPX |
| HESX1-related, 182230 (3) | |
| Pituitary hormone deficiency, combined, | LHX3 |
| with rigid cervical spine, 262600 (3) | |
| Pituitary tumor, invasive (3) | PRKCA, PKCA |
| Placental abruption (3) | NOS3 |
| Placental steroid sulfatase deficiency (3) | STS, ARSC1, ARSC, SSDD |
| Plasmin inhibitor deficiency (3) | PLI, SERPINF2 |
| Plasminogen Tochigi disease (3) | PLG |
| Platelet-activating factor acetylhydrolase | PLA2G7, PAFAH |
| deficiency (3) | |
| Platelet ADP receptor defect (3) | P2RY12, P2Y12 |
| Platelet disorder, familial, with associated | RUNX1, CBFA2, AML1 |
| myeloid malignancy, 601399 (3) | |
| Platelet glycoprotein IV deficiency, 608404 | CD36 |
| (3) | |
| Pneumonitis, desquamative interstitial, | SFTPC, SFTP2 |
| 263000 (3) | |
| Pneumothorax, primary spontaneous, | FLCN, BHD |
| 173600 (3) | |
| Polycystic kidney and hepatic disease, | FCYT, PKHD1, ARPKD |
| 263200 (3) | |
| Polycystic kidney disease, adult type I, | PKD1 |
| 173900 (3) | |
| Polycystic kidney disease, adult, type II (3) | PKD2, PKD4 |
| Polycystic kidney disease, infantile severe, | PKDTS |
| with tuberous sclerosis (3) | |
| Polycystic liver disease, 174050 (3) | PRKCSH, G19P1, PCLD |
| Polycystic liver disease, 174050 (3) | SEC63 |
| Polycythemia, benign familial, 263400 (3) | VHL |
| Polycythemia vera, 263300 (3) | JAK2 |
| Polydactyly, postaxial, types A1 and B, | GLI3, PAPA, PAPB, ACLS |
| 174200 (3) | |
| Polydactyly, preaxial, type IV, 174700 (3) | GLI3, PAPA, PAPB, ACLS |
| Polymicrogyria, bilateral frontoparietal, | GPR56, TM7XN1, BFPP |
| 606854 (3) | |
| Polyposis, juvenile intestinal, 174900 (3) | BMPR1A, ACVRLK3, ALK3 |
| Polyposis, juvenile intestinal, 174900 (3) | MADH4, DPC4, SMAD4, JIP |
| Popliteal pterygium syndrome, 119500 (3) | IRF6, VWS, LPS, PIT, PPS, OFC6 |
| Porencephaly, 175780 (3) | COL4A1 |
| Porphyria, acute hepatic (3) | ALAD |
| Porphyria, acute intermittent (3) | HMBS, PBGD, UPS |
| Porphyria, acute intermittent, nonerythroid | HMBS, PBGD, UPS |
| variant (3) | |
| Porphyria, congenital erythropoietic, 263700 | UROS |
| (3) | |
| Porphyria cutanea tarda (3) | UROD |
| Porphyria, hepatoerythropoietic (3) | UROD |
| Porphyria variegata, 176200 (3) | HFE, HLA-H, HFE1 |
| Porphyria variegata, 176200 (3) | PPOX |
| PPM-X syndrome, 300055 (3) | MECP2, RTT, PPMX, MRX16, MRX79 |
| Prader-Willi syndrome, 176270 (3) | NDN |
| Prader-Willi syndrome, 176270 (3) | SNRPN |
| Precocious puberty, male, 176410 (3) | LHCGR |
| Preeclampsia/eclampsia 4 (3) | STOX1, PEE4 |
| Preeclampsia, susceptibility to, 189800 (3) | EPHX1 |
| Preeclampsia, susceptibility to (3) | AGT, SERPINA8 |
| Prekallikrein deficiency (3) | KLKB1, KLK3 |
| Premature chromosome condensation with | MCPH1 |
| microcephaly and mental retardation, | |
| 606858 (3) | |
| Premature ovarian failure, 300511 (3) | DIAPH2, DIA, POF2 |
| Premature ovarian failure 3, 608996 (3) | FOXL2, BPES, BPES1, PFRK, POF3 |
| Primary lateral sclerosis, juvenile, 606353 | ALS2, ALSJ, PLSJ, IAHSP |
| (3) | |
| Prion disease with protracted course, | PRNP, PRIP |
| 606688 (3) | |
| Progressive external ophthalmoplegia with | C10orf2, TWINKLE, PEO1, PEO |
| mitochondrial DNA deletions, 157640 (3) | |
| Progressive external ophthalmoplegia with | POLG, POLG1, POLGA, PEO |
| mitochondrial DNA deletions, 157640 (3) | |
| Progressive external ophthalmoplegia with | SLC25A4, ANT1, T1, PEO3 |
| mitochondrial DNA deletions, 157640 (3) | |
| Proguanil poor metabolizer (3) | CYP2C, CYP2C19 |
| Prolactinoma, hyperparathyroidism, | MEN1 |
| carcinoid syndrome (3) | |
| Prolidase deficiency (3) | PEPD |
| Properdin deficiency, X-linked, 312060 (3) | PFC, PFD |
| Propionicacidemia, 606054 (3) | PCCA |
| Propionicacidemia, 606054 (3) | PCCB |
| Prostate cancer 1, 176807, 601518 (3) | RNASEL, RNS4, PRCA1, HPC1 |
| Prostate cancer, 176807 (3) | BRCA2, FANCD1 |
| Prostate cancer, 176807 (3) | PTEN, MMAC1 |
| Prostate cancer (3) | AR, DHTR, TFM, SBMA, KD, SMAX1 |
| Prostate cancer, familial, 176807 (3) | CHEK2, RAD53, CHK2, CDS1, LFS2 |
| Prostate cancer, hereditary, 176807 (3) | MSR1 |
| Prostate cancer, progression and | EPHB2, EPHT3, DRT, ERK |
| metastasis of, 176807 (3) | |
| Prostate cancer, somatic, 176807 (3) | KLF6, COPEB, BCD1, ZF9 |
| Prostate cancer, somatic, 176807 (3) | MAD1L1, TXBP181 |
| Prostate cancer, susceptibility to, 176807 | AR, DHTR, TFM, SBMA, KD, SMAX1 |
| (3) | |
| Prostate cancer, susceptibility to, 176807 | ATBF1 |
| (3) | |
| Prostate cancer, susceptibility to, 176807 | ELAC2, HPC2 |
| (3) | |
| Prostate cancer, susceptibility to, 176807 | MXI1 |
| (3) | |
| Protein S deficiency (3) | PROS1 |
| Proteinuria, low molecular weight, with | CLCN5, CLCK2, NPHL2, DENTS |
| hypercalciuric nephrocalcinosis (3) | |
| Protoporphyria, erythropoietic (3) | FECH, FCE |
| Protoporphyria, erythropoietic, recessive, | FECH, FCE |
| with liver failure (3) | |
| Proud syndrome, 300004 (3) | ARX, ISSX, PRTS, MRXS1, MRX36, |
| | MRX54 |
| Pseudoachondroplasia, 177170 (3) | COMP, EDM1, MED, PSACH |
| Pseudohermaphroditism, male, with | HSD17B3, EDH17B3 |
| gynecomastia, 264300 (3) | |
| Pseudohermaphroditism, male, with Leydig | LHCGR |
| cell hypoplasia (3) | |
| Pseudohypoaldosteronism, type I, 264350 | SCNN1A |
| (3) | |
| Pseudohypoaldosteronism, type I, 264350 | SCNN1B |
| (3) | |
| Pseudohypoaldosteronism, type I, 264350 | SCNN1G, PHA1 |
| (3) | |
| Pseudohypoaldosteronism type I, autosomal | NR3C2, MLR, MCR |
| dominant, 177735 (3) | |
| Pseudohypoaldosteronism type II (3) | WNK4, PRKWNK4, PHA2B |
| Pseudohypoaldosteronism, type IIC, 145260 | WNK1, PRKWNK1, KDP, PHA2C |
| (3) | |
| Pseudohypoparathyroidism, type Ia, 103580 | GNAS, GNAS1, GPSA, POH, PHP1B, |
| (3) | PHP1A, AHO |
| Pseudohypoparathyroidism, type Ib, 603233 | GNAS, GNAS1, GPSA, POH, PHP1B, |
| (3) | PHP1A, AHO |
| Pseudovaginal perineoscrotal hypospadias, | SRD5A2 |
| 264600 (3) | |
| Pseudovitamin D deficiency rickets 1 (3) | CYP27B1, PDDR, VDD1 |
| Pseudoxanthoma elasticum, autosomal | ABCC6, ARA, ABC34, MLP1, PXE |
| dominant, 177850 (3) | |
| Pseudoxanthoma elasticum, autosomal | ABCC6, ARA, ABC34, MLP1, PXE |
| recessive, 264800 (3) | |
| Psoriasis, susceptibility to, 177900 (3) | PSORS6 |
| Psoriatic arthritis, susceptibility to, 607507 | CARD15, NOD2, IBD1, CD, ACUG, |
| (3) | PSORAS1 |
| Pulmonary alveolar proteinosis, 265120 (3) | CSF2RB |
| Pulmonary alveolar proteinosis, 265120 (3) | SFTPC, SFTP2 |
| Pulmonary alveolar proteinosis, congenital, | SFTPB, SFTB3 |
| 265120 (3) | |
| Pulmonary fibrosis, idiopathic, familial, | SFTPC, SFTP2 |
| 178500 (3) | |
| Pulmonary fibrosis, idiopathic, susceptibility | SFTPA1, SFTP1 |
| to, 178500 (3) | |
| Pulmonary hypertension, familial primary, | BMPR2, PPH1 |
| 178600 (3) | |
| Pycnodysostosis, 265800 (3) | CTSK |
| Pyloric stenosis, infantile hypertrophic, | NOS1 |
| susceptibility to, 179010 (3) | |
| Pyogenic sterile arthritis, pyoderma | PSTPIP1, PSTPIP, CD2BP1, PAPAS |
| gangrenosum, and acne, 604416 (3) | |
| Pyropoikilocytosis (3) | SPTA1 |
| Pyruvate carboxylase deficiency, 266150 (3) | PC |
| Pyruvate dehydrogenase deficiency (3) | PDHA1, PHE1A |
| Pyruvate dehydrogenase E1-beta deficiency | PDHB |
| (3) | |
| Rabson-Mendenhall syndrome, 262190 (3) | INSR |
| Radioulnar synostosis with amegakaryocytic | HOXA11, HOX1I |
| thrombocytopenia, 605432 (3) | |
| RAPADILINO syndrome, 266280 (3) | RECQL4, RTS, RECQ4 |
| Rapid progression to AIDS from HIV1 | CX3CR1, GPR13, V28 |
| infection (3) | |
| Rapp-Hodgkin syndrome, 129400 (3) | TP73L, TP63, KET, EEC3, SHFM4, |
| | LMS, RHS |
| Red hair/fair skin (3) | MC1R |
| Refsum disease, 266500 (3) | PEX7, RCDP1 |
| Refsum disease, 266500 (3) | PHYH, PAHX |
| Refsum disease, infantile, 266510 (3) | PEX1, ZWS1 |
| Refsum disease, infantile form, 266510 (3) | PEX26 |
| Refsum disease, infantile form, 266510 (3) | PXMP3, PAF1, PMP35, PEX2 |
| Renal carcinoma, chromophobe, somatic, | FLCN, BHD |
| 144700 (3) | |
| Renal cell carcinoma, 144700 (3) | TRC8, RCA1, HRCA1 |
| Renal cell carcinoma, clear cell, somatic, | OGG1 |
| 144700 (3) | |
| Renal cell carcinoma, papillary, 1, 605074 | PRCC, RCCP1 |
| (3) | |
| Renal cell carcinoma, papillary, 1, 605074 | TFE3 |
| (3) | |
| Renal cell carcinoma, papillary, familial and | MET |
| sporadic, 605074 (3) | |
| Renal cell carcinoma, somatic (3) | VHL |
| Renal glucosuria, 233100 (3) | SLC5A2, SGLT2 |
| Renal hypoplasia, isolated (3) | PAX2 |
| Renal tubular acidosis, distal, 179800, | SLC4A1, AE1, EPB3 |
| 602722 (3) | |
| Renal tubular acidosis, distal, autosomal | ATP6V0A4, ATP6N1B, VPP2, RTA1C, |
| recessive, 602722 (3) | RTADR |
| Renal tubular acidosis-osteopetrosis | CA2 |
| syndrome (3) | |
| Renal tubular acidosis, proximal, with ocular | SLC4A4, NBC1, KNBC, SLC4A5 |
| abnormalities, 604278 (3) | |
| Renal tubular acidosis with deafness, | ATP6B1, VPP3 |
| 267300 (3) | |
| Renal tubular dysgenesis, 267430 (3) | ACE, DCP1, ACE1 |
| Renal tubular dysgenesis, 267430 (3) | AGTR1, AGTR1A, AT2R1 |
| Renal tubular dysgenesis, 267430 (3) | AGT, SERPINA8 |
| Renal tubular dysgenesis, 267430 (3) | REN |
| Renpenning syndrome, 309500 (3) | PQBP1, NPW38, SHS, MRX55, |
| | MRXS3, RENS1, MRXS8 |
| Response to morphine-6-glucuronide (3) | OPRM1 |
| Resting heart rate, 607276 (3) | ADRB1, ADRB1R, RHR |
| Restrictive dermopathy, lethal, 275210 (3) | ZMPSTE24, FACE1, STE24, MADB |
| Retinal degeneration, autosomal recessive, | NRL, D14S46E, RP27 |
| clumped pigment type (3) | |
| Retinal degeneration, autosomal recessive, | PROM1, PROML1, AC133 |
| prominin-related (3) | |
| Retinal degeneration, late-onset, autosomal | C1QTNF5, CTRP5, LORD |
| dominant, 605670 (3) | |
| Retinal dystrophy, early-onset severe (3) | LRAT |
| Retinitis pigmentosa-10, 180105 (3) | IMPDH1 |
| Retinitis pigmentosa-11, 600138 (3) | PRPF31, PRP31 |
| Retinitis pigmentosa-1, 180100 (3) | RP1, ORP1 |
| Retinitis pigmentosa-12, autosomal | CRB1, RP12 |
| recessive, 600105 (3) | |
| Retinitis pigmentosa-13, 600059 (3) | PRPF8, PRPC8, RP13 |
| Retinitis pigmentosa-14, 600132 (3) | TULP1, RP14 |
| Retinitis pigmentosa-17, 600852 (3) | CA4, RP17 |
| Retinitis pigmentosa-18, 601414 (3) | HPRP3, RP18 |
| Retinitis pigmentosa-19, 601718 (3) | ABCA4, ABCR, STGD1, FFM, RP19 |
| Retinitis pigmentosa-20 (3) | RPE65, RP20 |
| Retinitis pigmentosa-2 (3) | RP2 |
| Retinitis pigmentosa-26, 608380 (3) | CERKL |
| Retinitis pigmentosa-27 (3) | NRL, D14S46E, RP27 |
| Retinitis pigmentosa-30, 607921 (3) | FSCN2, RFSN |
| Retinitis pigmentosa-3, 300389 (3) | RPGR, RP3, CRD, RP15, COD1 |
| Retinitis pigmentosa-4, autosomal dominant | RHO, RP4, OPN2 |
| (3) | |
| Retinitis pigmentosa-7, 608133 (3) | RDS, RP7, PRPH2, PRPH, AVMD, |
| | AOFMD |
| Retinitis pigmentosa-9, 180104 (3) | RP9 |
| Retinitis pigmentosa, AR, 268000 (3) | RLBP1 |
| Retinitis pigmentosa, AR, without hearing | USH2A |
| loss, 268000 (3) | |
| Retinitis pigmentosa, autosomal dominant | RGR |
| (3) | |
| Retinitis pigmentosa, autosomal recessive, | CNGB1, CNCG3L, CNCG2 |
| 268000 (3) | |
| Retinitis pigmentosa, autosomal recessive | CNGA1, CNCG1 |
| (3) | |
| Retinitis pigmentosa, autosomal recessive | PDE6A, PDEA |
| (3) | |
| Retinitis pigmentosa, autosomal recessive | PDE6B, PDEB, CSNB3 |
| (3) | |
| Retinitis pigmentosa, autosomal recessive | RGR |
| (3) | |
| Retinitis pigmentosa, autosomal recessive | RHO, RP4, OPN2 |
| (3) | |
| Retinitis pigmentosa, digenic (3) | ROM1, ROSP1 |
| Retinitis pigmentosa, digenic, 608133 (3) | RDS, RP7, PRPH2, PRPH, AVMD, |
| | AOFMD |
| Retinitis pigmentosa, juvenile (3) | AIPL1, LCA4 |
| Retinitis pigmentosa, late onset, 268000 (3) | NR2E3, PNR, ESCS |
| Retinitis pigmentosa, late-onset dominant, | CRX, CORD2, CRD |
| 268000 (3) | |
| Retinitis pigmentosa, MERTK-related, | MERTK |
| 268000 (3) | |
| Retinitis pigmentosa, X-linked with deafness | RPGR, RP3, CRD, RP15, COD1 |
| and sinorespiratory infections, 300455 (3) | |
| Retinitis pigmentosa, X-linked, with | RPGR, RP3, CRD, RP15, COD1 |
| recurrent respiratory infections, 300455 (3) | |
| Retinitis punctata albescens, 136880 (3) | RDS, RP7, PRPH2, PRPH, AVMD, |
| | AOFMD |
| Retinitis punctata albescens, 136880 (3) | RLBP1 |
| Retinoblastoma (3) | RB1 |
| Retinol binding protein, deficiency of (3) | RBP4 |
| Retinoschisis (3) | RS1, XLRS1 |
| Rett syndrome, 312750 (3) | MECP2, RTT, PPMX, MRX16, MRX79 |
| Rett syndrome, atypical, 312750 (3) | CDKL5, STK9 |
| Rett syndrome, preserved speech variant, | MECP2, RTT, PPMX, MRX16, MRX79 |
| 312750 (3) | |
| Rhabdoid predisposition syndrome, familial | SMARCB1, SNF5, INI1, RDT |
| (3) | |
| Rhabdoid tumors (3) | SMARCB1, SNF5, INI1, RDT |
| Rhabdomyosarcoma, 268210 (3) | SLC22A1L, BWSCR1A, IMPT1 |
| Rhabdomyosarcoma, alveolar, 268220 (3) | FOXO1A, FKHR |
| Rhabdomyosarcoma, alveolar, 268220 (3) | PAX3, WS1, HUP2, CDHS |
| Rhabdomyosarcoma, alveolar, 268220 (3) | PAX7 |
| Rheumatoid arthritis, progression of, | IL10, CSIF |
| 180300 (3) | |
| Rheumatoid arthritis, susceptibility to, | MHC2TA, C2TA |
| 180300 (3) | |
| Rheumatoid arthritis, susceptibility to, | NFKBIL1 |
| 180300 (3) | |
| Rheumatoid arthritis, susceptibility to, | PADI4, PADI5, PAD |
| 180300 (3) | |
| Rheumatoid arthritis, susceptibility to, | PTPN8, PEP, PTPN22, LYP |
| 180300 (3) | |
| Rheumatoid arthritis, susceptibility to, | RUNX1, CBFA2, AML1 |
| 180300 (3) | |
| Rheumatoid arthritis, susceptibility to, | SLC22A4, OCTN1 |
| 180300 (3) | |
| Rheumatoid arthritis, systemic juvenile, | MIF |
| susceptibility to, 604302 (3) | |
| Rhizomelic chondrodysplasia punctata, type | PEX7, RCDP1 |
| 1, 215100 (3) | |
| Rhizomelic chondrodysplasia punctata, type | AGPS, ADHAPS |
| 3, 600121 (3) | |
| Rh-mod syndrome (3) | RHAG, RH50A |
| Rh-negative blood type (3) | RHD |
| Rh-null disease, amorph type (3) | RHCE |
| Ribose 5-phosphate isomerase deficiency, | RPIA, RPI |
| 608611 (3) | |
| Rickets due to defect in vitamin D 25- | CYP2R1 |
| hydroxylation, 600081 (3) | |
| Rickets, vitamin D-resistant, type IIA, | VDR |
| 277440 (3) | |
| Rickets, vitamin D-resistant, type IIB, | VDR |
| 277420 (3) | |
| Rieger anomaly (3) | FOXC1, FKHL7, FREAC3 |
| Rieger syndrome, 180500 (3) | PITX2, IDG2, RIEG1, RGS, IGDS2 |
| Ring dermoid of cornea, 180550 (3) | PITX2, IDG2, RIEG1, RGS, IGDS2 |
| Rippling muscle disease, 606072 (3) | CAV3, LGMD1C |
| Roberts syndrome, 268300 (3) | ESCO2 |
| Robinow syndrome, autosomal recessive, | ROR2, BDB1, BDB, NTRKR2 |
| 268310 (3) | |
| Rokitansky-Kuster-Hauser syndrome, | WNT4 |
| 277000 (3) | |
| Rothmund-Thomson syndrome, 268400 (3) | RECQL4, RTS, RECQ4 |
| Roussy-Levy syndrome, 180800 (3) | MPZ, CMT1B, CMTDI3, CHM, DSS |
| Roussy-Levy syndrome, 180800 (3) | PMP22, CMT1A, CMT1E, DSS |
| Rubenstein-Taybi syndrome, 180849 (3) | CREBBP, CBP, RSTS |
| Rubinstein-Taybi syndrome, 180849 (3) | EP300 |
| Saethre-Chotzen syndrome, 101400 (3) | FGFR2, BEK, CFD1, JWS |
| Saethre-Chotzen syndrome, 101400 (3) | TWIST, ACS3, SCS |
| Saethre-Chotzen syndrome with eyelid | TWIST, ACS3, SCS |
| anomalies, 101400 (3) | |
| Salivary adenoma (3) | HMGA2, HMGIC, BABL, LIPO |
| Salla disease, 604369 (3) | SLC17A5, SIASD, SLD |
| Sandhoff disease, infantile, juvenile, and | HEXB |
| adult forms, 268800 (3) | |
| Sanfilippo syndrome, type A, 252900 (3) | SGSH, MPS3A, SFMD |
| Sanfilippo syndrome, type B (3) | NAGLU |
| Sarcoidosis, early-onset, 181000 (3) | CARD15, NOD2, IBD1, CD, ACUG, |
| | PSORAS1 |
| Sarcoidosis, susceptibility to, 181000 (3) | BTNL2 |
| Sarcoidosis, susceptibility to, 181000 (3) | HLA-DR1B |
| Sarcoma, synovial (3) | SSX1, SSRC |
| Sarcoma, synovial (3) | SSX2 |
| SARS, progression of (3) | ACE, DCP1, ACE1 |
| Schimke immunoosseous dysplasia, | SMARCAL1, HARP, SIOD |
| 242900 (3) | |
| Schindler disease, type I, 609241 (3) | NAGA |
| Schindler disease, type III, 609241 (3) | NAGA |
| Schizencephaly, 269160 (3) | EMX2 |
| Schizoaffective disorder, susceptibility to, | DISC1 |
| 181500 (3) | |
| Schizophrenia 5, 603175 (3) | TRAR4 |
| Schizophrenia, chronic (3) | APP, AAA, CVAP, AD1 |
| Schizophrenia, susceptibility to, 181500 (3) | COMT |
| Schizophrenia, susceptibility to, 181500 (3) | DISC1 |
| Schizophrenia, susceptibility to, 181500 (3) | HTR2A |
| Schizophrenia, susceptibility to, 181500 (3) | RTN4R, NOGOR |
| Schizophrenia, susceptibility to, 181500 (3) | SYN2 |
| Schizophrenia, susceptibility to, 181510 (3) | EPN4, EPNR, KIAA0171, SCZD1 |
| Schizophrenia, susceptibility to, 4 600850 | PRODH, PRODH2, SCZD4 |
| (3) | |
| Schwannomatosis, 162091 (3) | NF2 |
| Schwartz-Jampel syndrome, type 1, 255800 | HSPG2, PLC, SJS, SJA, SJS1 |
| (3) | |
| SCI D, autosomal recessive, T-negative/B- | JAK3, JAKL |
| positive type (3) | |
| Sclerosteosis, 269500 (3) | SOST |
| Scurvy (3) | GULOP, GULO |
| Sea-blue histiocyte disease, 269600 (3) | APOE, AD2 |
| Seasonal affective disorder, susceptibility to, | HTR2A |
| 608516 (3) | |
| Sebastian syndrome, 605249 (3) | MYH9, MHA, FTNS, DFNA17 |
| Seckel syndrome 1, 210600 (3) | ATR, FRP1, SCKL |
| Segawa syndrome, recessive (3) | TH, TYH |
| Seizures, afebrile, 604233 (3) | SCN2A1, SCN2A |
| Seizures, benign familial neonatal-infantile, | SCN2A1, SCN2A |
| 607745 (3) | |
| Selective T-cell defect (3) | ZAP70, SRK, STD |
| Self-healing collodion baby, 242300 (3) | TGM1, ICR2, LI1 |
| SEMD, Pakistani type (3) | PAPSS2, ATPSK2 |
| Senior-Loken syndrome-1, 266900 (3) | NPHP1, NPH1, SLSN1 |
| Senior-Loken syndrome 4, 606996 (3) | NPHP4, SLSN4 |
| Senior-Loken syndrome 5, 609254 (3) | IQCB1, NPHP5, KIAA0036 |
| Sensory ataxic neuropathy, dysarthria, and | POLG, POLG1, POLGA, PEO |
| ophthalmoparesis, 157640 (3) | |
| Sepiapterin reductase deficiency (3) | SPR |
| Sepsis, susceptibility to (3) | CASP12, CASP12P1 |
| Septic shock, susceptibility to (3) | TNF, TNFA |
| Septooptic dysplasia, 182230 (3) | HESX1, RPX |
| Sertoli cell-only syndrome, susceptibility to, | USP26 |
| 305700 (3) | |
| Severe combined immunodeficiency, | DCLRE1C, ARTEMIS, SCIDA |
| Athabascan type, 602450 (3) | |
| Severe combined immunodeficiency, B cell- | RAG1 |
| negative, 601457 (3) | |
| Severe combined immunodeficiency, B cell- | RAG2 |
| negative, 601457 (3) | |
| Severe combined immunodeficiency due to | ADA |
| ADA deficiency, 102700 (3) | |
| Severe combined immunodeficiency due to | PTPRC, CD45, LCA |
| PTPRC deficiency (3) | |
| Severe combined immunodeficiency, T-cell | IL7R |
| negative, B-cell/natural killer cell-positive | |
| type, 600802 (3) | |
| Severe combined immunodeficiency, T- | CD3D, T3D |
| negative/B-positive type, 600802 (3) | |
| Severe combined immunodeficiency, X- | IL2RG, SCIDX1, SCIDX, IMD4 |
| linked, 300400 (3) | |
| Sex reversal, XY, with adrenal failure (3) | FTZF1, FTZ1, SF1 |
| Sezary syndrome (3) | BCL10 |
| Shah-Waardenburg syndrome, 277580 (3) | EDN3 |
| Short stature, autosomal dominant, with | GHR |
| normal serum growth hormone binding | |
| protein (3) | |
| Short stature, idiopathic (3) | GHR |
| Short stature, idiopathic familial, 604271 (3) | SHOX, GCFX, SS, PHOG |
| Short stature, idiopathic familial, 604271 (3) | SHOXY |
| Short stature, pituitary and cerebellar | LHX4 |
| defects, and small sella turcica, 606606 (3) | |
| Shprintzen-Goldberg syndrome, 182212 (3) | FBN1, MFS1, WMS |
| Shwachman-Diamond syndrome, 260400 | SBDS, SDS |
| (3) | |
| Sialic acid storage disorder, infantile, | SLC17A5, SIASD, SLD |
| 269920 (3) | |
| Sialidosis, type I, 256550 (3) | NEU1, NEU, SIAL1 |
| Sialidosis, type II, 256550 (3) | NEU1, NEU, SIAL1 |
| Sialuria, 269921 (3) | GNE, GLCNE, IBM2, DMRV, NM |
| Sickle cell anemia (3) | HBB |
| Sick sinus syndrome, 608567 (3) | SCN5A, LQT3, IVF, HB1, SSS1 |
| Silver spastic paraplegia syndrome, 270685 | BSCL2, SPG17 |
| (3) | |
| Simpson-Golabi-Behmel syndrome, type 1, | GPC3, SDYS, SGBS1 |
| 312870 (3) | |
| Sitosterolemia, 210250 (3) | ABCG5 |
| Sitosterolemia, 210250 (3) | ABCG8 |
| Situs ambiguus (3) | NODAL |
| Situs inversus viscerum, 270100 (3) | DNAH11, DNAHC11 |
| Sjogren-Larsson syndrome, 270200 (3) | ALDH3A2, ALDH10, SLS, FALDH |
| Skin fragility-woolly hair syndrome, 607655 | DSP, KPPS2, PPKS2 |
| (3) | |
| Slow acetylation (3) | NAT2, AAC2 |
| Slowed nerve conduction velocity, AD, | ARHGEF10, KIAA0294 |
| 608236 (3) | |
| Small patella syndrome, 147891 (3) | TBX4 |
| SMED Strudwick type, 184250 (3) | COL2A1 |
| Smith-Fineman-Myers syndrome, 309580 | ATRX, XH2, XNP, MRXS3, SHS |
| (3) | |
| Smith-Lemli-Opitz syndrome, 270400 (3) | DHCR7, SLOS |
| Smith-Magenis syndrome, 182290 (3) | RAI1, SMCR, SMS |
| Smith-McCort dysplasia, 607326 (3) | DYM, FLJ90130, DMC, SMC |
| Solitary median maxillary central incisor, | SHH, HPE3, HLP3, SMMCI |
| 147250 (3) | |
| Somatotrophinoma (3) | GNAS, GNAS1, GPSA, POH, PHP1B, |
| | PHP1A, AHO |
| Sorsby fundus dystrophy, 136900 (3) | TIMP3, SFD |
| Sotos syndrome, 117550 (3) | NSD1, ARA267, STO |
| Spastic ataxia, Charlevoix-Saguenay type, | SACS, ARSACS |
| 270550 (3) | |
| Spastic paralysis, infantile onset ascending, | ALS2, ALSJ, PLSJ, IAHSP |
| 607225 (3) | |
| Spastic paraplegia 10, 604187 (3) | KIF5A, NKHC, SPG10 |
| Spastic paraplegia-13, 605280 (3) | HSPD1, SPG13, HSP60 |
| Spastic paraplegia-2, 312920 (3) | PLP1, PMD |
| Spastic paraplegia-3A, 182600 (3) | SPG3A |
| Spastic paraplegia-4, 182601 (3) | SPG4, SPAST |
| Spastic paraplegia-6, 600363 (3) | NIPA1, SPG6 |
| Spastic paraplegia-7, 607259 (3) | PGN, SPG7, CMAR, CAR |
| Specific granule deficiency, 245480 (3) | CEBPE, CRP1 |
| Speech-language disorder-1, 602081 (3) | FOXP2, SPCH1, TNRC10, CAGH44 |
| Spermatogenic failure, susceptibility to (3) | DAZL, DAZH, SPGYLA |
| Spherocytosis-1 (3) | SPTB |
| Spherocytosis-2 (3) | ANK1, SPH2 |
| Spherocytosis, hereditary (3) | SLC4A1, AE1, EPB3 |
| Spherocytosis, hereditary, Japanese type | EPB42 |
| (3) | |
| Spherocytosis, recessive (3) | SPTA1 |
| Spina bifida, 601634 (3) | MTHFD, MTHFC |
| Spina bifida, risk of, 601634, 182940 (3) | MTR |
| Spina bifida, risk of, 601634, 182940 (3) | MTRR |
| Spinal and bulbar muscular atrophy of | AR, DHTR, TFM, SBMA, KD, SMAX1 |
| Kennedy, 313200 (3) | |
| Spinal muscrular atrophy, late-onset, Finkel | VAPB, VAPC, ALS8 |
| type, 182980 (3) | |
| Spinal muscular atrophy-1, 253300 (3) | SMN1, SMA1, SMA2, SMA3, SMA4 |
| Spinal muscular atrophy-2, 253550 (3) | SMN1, SMA1, SMA2, SMA3, SMA4 |
| Spinal muscular atrophy-3, 253400 (3) | SMN1, SMA1, SMA2, SMA3, SMA4 |
| Spinal muscular atrophy-4, 271150 (3) | SMN1, SMA1, SMA2, SMA3, SMA4 |
| Spinal muscular atrophy, distal, type V, | BSCL2, SPG17 |
| 600794 (3) | |
| Spinal muscular atrophy, distal, type V, | GARS, SMAD1, CMT2D |
| 600794 (3) | |
| Spinal muscular atrophy, juvenile (3) | HEXB |
| Spinal muscular atrophy with respiratory | IGHMBP2, SMUBP2, CATF1, SMARD1 |
| distress, 604320 (3) | |
| Spinocerebellar ataxia-10 (3) | ATXN10, SCA10 |
| Spinocerebellar ataxia-1, 164400 (3) | ATXN1, ATX1, SCA1 |
| Spinocerebellar ataxia 12, 604326 (3) | PPP2R2B |
| Spinocerebellar ataxia 14, 605361 (3) | PRKCG, PKCC, PKCG, SCA14 |
| Spinocerebellar ataxia 17, 607136 (3) | TBP, SCA17 |
| Spinocerebellar ataxia-2, 183090 (3) | ATXN2, ATX2, SCA2 |
| Spinocerebellar ataxia 25 (3) | SCA25 |
| Spinocerebellar ataxia-27, 609307 (3) | FGF14, FHF4, SCA27 |
| Spinocerebellar ataxia 4, pure Japanese | PLEKHG4 |
| type, 117210 (3) | |
| Spinocerebellar ataxia-6, 183086 (3) | CACNA1A, CACNL1A4, SCA6 |
| Spinocerebellar ataxia-7, 164500 (3) | ATXN7, SCA7, OPCA3 |
| Spinocerebellar ataxia 8, 608768 (3) | SCA8 |
| Spinocerebellar ataxia, autosomal recessive | TDP1 |
| with axonal neuropathy, 607250 (3) | |
| Split hand/foot malformation, type 3, 600095 | SHFM3, DAC |
| (3) | |
| Split-hand/foot malformation, type 4, 605289 | TP73L, TP63, KET, EEC3, SHFM4, |
| (3) | LMS, RHS |
| Spondylocarpotarsal synostosis syndrome, | FLNB, SCT, AOI |
| 272460 (3) | |
| Spondylocostal dysostosis, autosomal | DLL3, SCDO1 |
| recessive, 1, 277300 (3) | |
| Spondylocostal dysostosis, autosomal | MESP2 |
| recessive 2, 608681 (3) | |
| Spondyloepimetaphyseal dysplasia, 608728 | MATN3, EDM5, HOA |
| (3) | |
| Spondyloepiphyseal dysplasia, Kimberley | AGC1, CSPG1, MSK16, SEDK |
| type, 608361 (3) | |
| Spondyloepiphyseal dysplasia, Omani type, | CHST3, C6ST, C6ST1 |
| 608637 (3) | |
| Spondyloepiphyseal dysplasia tarda, | SEDL, SEDT |
| 313400 (3) | |
| Spondyloepiphyseal dysplasia tarda with | WISP3, PPAC, PPD |
| progressive arthropathy, 208230 (3) | |
| Spondylometaphyseal dysplasia, Japanese | COL10A1 |
| type (3) | |
| Squamous cell carcinoma, burn scar- | TNFRSF6, APT1, FAS, CD95, ALPS1A |
| related, somatic (3) | |
| Squamous cell carcinoma, head and neck, | ING1 |
| 601400 (3) | |
| Squamous cell carcinoma, head and neck, | TNFRSF10B, DR5, TRAILR2 |
| 601400 (3) | |
| Stapes ankylosis syndrome without | NOG, SYM1, SYNS1 |
| symphalangism, 184460 (3) | |
| Stargardt disease-1, 248200 (3) | ABCA4, ABCR, STGD1, FFM, RP19 |
| Stargardt disease 3, 600110 (3) | ELOVL4, ADMD, STGD2, STGD3 |
| Startle disease, autosomal recessive (3) | GLRA1, STHE |
| Startle disease/hyperekplexia, autosomal | GLRA1, STHE |
| dominant, 149400 (3) | |
| STAT1 deficiency, complete (3) | STAT1 |
| Statins, attenuated cholesterol lowering by | HMGCR |
| (3) | |
| Steatocystoma multiplex, 184500 (3) | KRT17, PC2, PCHC1 |
| Stem-cell leukemia/lymphoma syndrome (3) | ZNF198, SCLL, RAMP, FIM |
| Stevens-Johnson syndrome, | HLA-B |
| carbamazepine-induced, susceptibility to, | |
| 608579 (3) | |
| Stickler syndrome, type I, 108300 (3) | COL2A1 |
| Stickler syndrome, type II, 604841 (3) | COL11A1, STL2 |
| Stickler syndrome, type III, 184840 (3) | COL11A2, STL3, DFNA13 |
| Stomach cancer, 137215 (3) | KRAS2, RASK2 |
| Stroke, susceptibility to, 1, 606799 (3) | PDE4D, DPDE3, STRK1 |
| Stroke, susceptibility to, 601367 (3) | ALOX5AP, FLAP |
| Stuve-Wiedemann syndrome/Schwartz- | LIFR, STWS, SWS, SJS2 |
| Jampel type 2 syndrome, 601559 (3) | |
| Subcortical laminal heteropia, X-linked, | DCX, DBCN, LISX |
| 300067 (3) | |
| Subcortical laminar heterotopia (3) | PAFAH1B1, LIS1 |
| Succinic semialdehyde dehydrogenase | SSADH |
| deficiency (3) | |
| Sucrose intolerance (3) | SI |
| Sudden infant death with dysgenesis of the | TSPYL1, TSPYL, SIDDT |
| testes syndrome, 608800 (3) | |
| Sulfite oxidase deficiency, 272300 (3) | SUOX |
| Superoxide dismutase, elevated | SOD3 |
| extracellular (3) | |
| Supranuclear palsy, progressive, 601104 (3) | MAPT, MTBT1, DDPAC, MSTD |
| Supranuclear palsy, progressive atypical, | MAPT, MTBT1, DDPAC, MSTD |
| 260540 (3) | |
| Supravalvar aortic stenosis, 185500 (3) | ELN |
| Surfactant deficiency, neonatal, 267450 (3) | ABCA3, ABC3 |
| Surfactant protein C deficiency (3) | SFTPC, SFTP2 |
| Sutherland-Haan syndrome-like, 300465 (3) | ATRX, XH2, XNP, MRXS3, SHS |
| Sweat chloride elevation without CF (3) | CFTR, ABCC7, CF, MRP7 |
| Symphalangism, proximal, 185800 (3) | NOG, SYM1, SYNS1 |
| Syndactyly, type III, 186100 (3) | GJA1, CX43, ODDD, SDTY3, ODOD |
| Synostoses syndrome, multiple, 1, 186500 | NOG, SYM1, SYNS1 |
| (3) | |
| Synpolydactyly, 3/3′4, associated with | FBLN1 |
| metacarpal and metatarsal synostoses, | |
| 608180 (3) | |
| Synpolydactyly, type II, 186000 (3) | HOXD13, HOX4I, SPD |
| Synpolydactyly with foot anomalies, 186000 | HOXD13, HOX4I, SPD |
| (3) | |
| Systemic lupus erythematosus, | TNFSF6, APT1LG1, FASL |
| susceptibility, 152700 (3) | |
| Systemic lupus erythematosus, | DNASE1, DNL1 |
| susceptibility to, 152700 (3) | |
| Systemic lupus erythematosus, | PTPN8, PEP, PTPN22, LYP |
| susceptibility to, 152700 (3) | |
| Systemic lupus erythematosus, | PDCD1, SLEB2 |
| susceptibility to, 2, 605218, 152700 (3) | |
| Tall stature, susceptibility to (3) | MCM6 |
| Tangier disease, 205400 (3) | ABCA1, ABC1, HDLDT1, TGD |
| Tarsal-carpal coalition syndrome, 186570 | NOG, SYM1, SYNS1 |
| (3) | |
| Tauopathy and respiratory failure (3) | MAPT, MTBT1, DDPAC, MSTD |
| Tay-Sachs disease, 272800 (3) | HEXA, TSD |
| T-cell acute lymphoblastic leukemia (3) | BAX |
| T-cell immunodeficiency, congenital | WHN |
| alopecia, and nail dystrophy (3) | |
| T-cell prolymphocytic leukemia, sporadic (3) | ATM, ATA, AT1 |
| Temperature-sensitive apoptosis, cellular | DAD1 |
| (3) | |
| Tetra-amelia, autosomal recessive, 273395 | WNT3, INT4 |
| (3) | |
| Tetralogy of Fallot, 187500 (3) | JAG1, AGS, AHD |
| Tetralogy of Fallot, 187500 (3) | ZFPM2, FOG2 |
| Tetralogy of Fallot, 187500 (3) | NKX2E, CSX |
| Thalassemia, alpha-(3) | HBA2 |
| Thalassemia-beta, dominant inclusion-body, | HBB |
| 603902 (3) | |
| Thalassemia, delta-(3) | HBD |
| Thalassemia due to Hb Lepore (3) | HBD |
| Thalassemia, Hispanic gamma-delta-beta | LCRB |
| (3) | |
| Thalassemias, alpha-(3) | HBA1 |
| Thalassemias, beta-(3) | HBB |
| Thanatophoric dysplasia, types I and II, | FGFR3, ACH |
| 187600 (3) | |
| Thiamine-responsive megaloblastic anemia | SLC19A2, THTR1 |
| syndrome, 249270 (3) | |
| Thrombocythemia, essential, 187950 (3) | JAK2 |
| Thrombocythemia, essential, 187950 (3) | THPO, MGDF, MPLLG, TPO |
| Thrombocytopenia-2, 188000 (3) | FLJ14813, THC2 |
| Thrombocytopenia, congenital | MPL, TPOR, MPLV |
| amegakaryocytic, 604498 (3) | |
| Thrombocytopenia, X-linked, 313900 (3) | WAS, IMD2, THC |
| Thrombocytopenia, X-linked, intermittent, | WAS, IMD2, THC |
| 313900 (3) | |
| Thromboembolism susceptibility due to | F5 |
| factor V Leiden (3) | |
| Thrombophilia due to factor V Liverpool (3) | F5 |
| Thrombophilia due to heparin cofactor II | HCF2, HC2, SERPIND1 |
| deficiency (3) | |
| Thrombophilia due to HRG deficiency (3) | HRG |
| Thrombophilia due to protein C deficiency | PROC |
| (3) | |
| Thrombophilia due to thrombomodulin | THBD, THRM |
| defect (3) | |
| Thrombophilia, dysfibrinogenemic (3) | FGB |
| Thrombophilia, dysfibrinogenemic (3) | FGG |
| Thrombosis, hyperhomocysteinemic (3) | CBS |
| Thrombotic thrombocytopenic purpura, | ADAMTS13, VWFCP, TTP |
| familial, 274150 (3) | |
| Thrombycytosis, susceptibility to, 187950 | MPL, TPOR, MPLV |
| (3) | |
| Thymine-uraciluria (3) | DPYD, DPD |
| Thyroid adenoma, hyperfunctioning (3) | TSHR |
| Thyroid carcinoma (3) | TP53, P53, LFS1 |
| Thyroid carcinoma, follicular, 188470 (3) | MINPP1, HIPER1 |
| Thyroid carcinoma, follicular, 188470 (3) | PTEN, MMAC1 |
| Thyroid carcinoma, follicular, somatic, | HRAS |
| 188470 (3) | |
| Thyroid carcinoma, papillary, 188550 (3) | GOLGA5, RFG5, PTC5 |
| Thyroid carcinoma, papillary, 188550 (3) | NCOA4, ELE1, PTC3 |
| Thyroid carcinoma, papillary, 188550 (3) | PCM1, PTC4 |
| Thyroid carcinoma, papillary, 188550 (3) | PRKAR1A, TSE1, CNC1, CAR |
| Thyroid carcinoma, papillary, 188550 (3) | TIF1G, RFG7, PTC7 |
| Thyroid carcinoma, papillary, 188550 (3) | TRIM24, TIF1, TIF1A, PTC6 |
| Thyroid hormone organification defect IIA, | TPO, TPX |
| 274500 (3) | |
| Thyroid hormone resistance, 188570 (3) | THRB, ERBA2, THR1 |
| Thyroid hormone resistance, autosomal | THRB, ERBA2, THR1 |
| recessive, 274300 (3) | |
| Thyrotoxic periodic paralysis, susceptibility | CACNA1S, CACNL1A3, CCHL1A3 |
| to, 188580 (3) | |
| Thyrotropin-releasing hormone resistance, | TRHR |
| generalized (3) | |
| Thyroxine-binding globulin deficiency (3) | TBG |
| Tietz syndrome, 103500 (3) | MITF, WS2A |
| Timothy syndrome, 601005 (3) | CACNA1C, CACNL1A1, CCHL1A1, TS |
| Toenail dystrophy, isolated, 607523 (3) | COL7A1 |
| Tolbutamide poor metabolizer (3) | CYP2C9 |
| Total iodide organification defect, 274500 | TPO, TPX |
| (3) | |
| Townes-Brocks branchiootorenal-like | SALL1, HSAL1, TBS |
| syndrome, 107480 (3) | |
| Townes-Brocks syndrome, 107480 (3) | SALL1, HSAL1, TBS |
| Transaldolase deficiency, 606003 (3) | TALDO1 |
| Transcobalamin II deficiency (3) | TCN2, TC2 |
| Transient bullous of the newborn, 131705 | COL7A1 |
| (3) | |
| Transposition of great arteries, dextro- | CFC1, CRYPTIC, HTX2 |
| looped, 217095 (3) | |
| Transposition of the great arteries, dextro- | THRAP2, PROSIT240, TRAP240L, |
| looped, 608808 (3) | KIAA1025 |
| Treacher Collins mandibulofacial | TCOF1, MFD1 |
| dysostosis, 154500 (3) | |
| Tremor, familial essential, 2, 602134 (3) | HS1BP3, FLJ14249, ETM2 |
| Trichodontoosseous syndrome, 190320 (3) | DLX3, TDO |
| Trichorhinophalangeal syndrome, type I, | TRPS1 |
| 190350 (3) | |
| Trichorhinophalangeal syndrome, type III, | TRPS1 |
| 190351 (3) | |
| Trichothiodystrophy (3) | ERCC3, XPB |
| Trichothiodystrophy, 601675 (3) | ERCC2, EM9 |
| Trichothiodystrophy, complementation | TGF2H5, TTDA, TFB5, C6orf175 |
| group A, 601675 (3) | |
| Trichothiodystrophy, nonphotosensitive 1, | TTDN1, C7orf11, ABHS |
| 234050 (3) | |
| Trifunctional protein deficiency, type I (3) | HADHA, MTPA |
| Trifunctional protein deficiency, type II (3) | HADHB |
| Trismus-pseudocomptodactyly syndrome, | MYH8 |
| 158300 (3) | |
| Tropical calcific pancreatitis, 608189 (3) | SPINK1, PSTI, PCTT, TATI |
| Troyer syndrome, 275900 (3) | SPG20 |
| TSC2 angiomyolipomas, renal, modifier of, | IFNG |
| 191100 (3) | |
| Tuberculosis, susceptibility to (3) | IFNGR1 |
| Tuberculosis, susceptibility to, 607948 (3) | IFNG |
| Tuberous sclerosis-1, 191100 (3) | TSC1, LAM |
| Tuberous sclerosis-2, 191100 (3) | TSC2, LAM |
| Turcot syndrome, 276300 (3) | APC, GS, FPC |
| Turcot syndrome with glioblastoma, 276300 | MLH1, COCA2, HNPCC2 |
| (3) | |
| Turcot syndrome with glioblastoma, 276300 | PMS2, PMSL2, HNPCC4 |
| (3) | |
| Twinning, dizygotic, 276400 (3) | FSHR, ODG1 |
| Tyrosinemia, type I (3) | FAH |
| Tyrosinemia, type II (3) | TAT |
| Tyrosinemia, type III (3) | HPD |
| Ullrich congenital muscular dystrophy, | COL6A1, OPLL |
| 254090 (3) | |
| Ullrich congenital muscular dystrophy, | COL6A3 |
| 254090 (3) | |
| Ullrich scleroatonic muscular dystrophy, | COL6A2 |
| 254090 (3) | |
| Ulnar-mammary syndrome, 181450 (3) | TBX3 |
| Unipolar depression, susceptibility to, | TPH2, NTPH |
| 608516 (3) | |
| Unna-Thost disease, nonepidermolytic, | KRT1 |
| 600962 (3) | |
| Urolithiasis, 2,8-dihydroxyadenine (3) | APRT |
| Urolithiasis, hypophosphatemic (3) | SLC17A2, NPT2 |
| Usher syndrome, type 1B (3) | MYO7A, USH1B, DFNB2, DFNA11 |
| Usher syndrome, type 1C, 276904 (3) | USH1C, DFNB18 |
| Usher syndrome, type 1D, 601067 (3) | CDH23, USH1D |
| Usher syndrome, type 1F, 602083 (3) | PCDH15, DFNB23 |
| Usher syndrome, type 1G, 606943 (3) | SANS, USH1G |
| Usher syndrome, type 2A, 276901 (3) | USH2A |
| Usher syndrome, type 3, 276902 (3) | USH3A, USH3 |
| Usher syndrome, type IIC, 605472 (3) | MASS1, VLGR1, KIAA0686, FEB4, |
| | USH2C |
| Uterine leiomyoma (3) | HMGA2, HMGIC, BABL, LIPO |
| UV-induced skin damage, vulnerability to (3) | MC1R |
| van Buchem disease, type 2, 607636 (3) | LRP5, BMND1, LRP7, LR3, OPPG, |
| | VBCH2 |
| van der Woude syndrome, 119300 (3) | IRF6, VWS, LPS, PIT, PPS, OFC6 |
| VATER association with hydrocephalus, | PTEN, MMAC1 |
| 276950 (3) | |
| Velocardiofacial syndrome, 192430 (3) | TBX1, DGS, CTHM, CAFS, TGA, |
| | DORV, VCFS, DGCR |
| Venous malformations, multiple cutaneous | TEK, TIE2, VMCM |
| and mucosal, 600195 (3) | |
| Venous thrombosis, susceptibility to (3) | SERPINA10, ZPI |
| Ventricular fibrillation, idiopathic, 603829 (3) | SCN5A, LQT3, IVF, HB1, SSS1 |
| Ventricular tachycardia, idiopathic, 192605 | GNAI2, GNAI2B, GIP |
| (3) | |
| Ventricular tachycardia, stress-induced | CASQ2 |
| polymorphic, 604772 (3) | |
| Ventricular tachycardia, stress-induced | RYR2, VTSIP |
| polymorphic, 604772 (3) | |
| Vertical talus, congenital, 192950 (3) | HOXD10, HOX4D |
| Viral infections, recurrent (3) | FCGR3A, CD16, IGFR3 |
| Viral infection, susceptibility to (3) | OAS1, OIAS |
| Virilization, maternal and fetal, from | CYP19A1, CYP19, ARO |
| placental aromatase deficiency (3) | |
| Vitamin K-dependent clotting factors, | VKORC1, VKOR, VKCFD2, FLJ00289 |
| combined deficiency of, 2, 607473 (3) | |
| Vitamin K-dependent coagulation defect, | GGCX |
| 277450 (3) | |
| Vitelliform macular dystrophy, adult-onset, | VMD2 |
| 608161 (3) | |
| VLCAD deficiency, 201475 (3) | ACADVL, VLCAD |
| Vohwinkel syndrome, 124500 (3) | GJB2, CX26, DFNB1, PPK, DFNA3, |
| | KID, HID |
| Vohwinkel syndrome with ichthyosis, | LOR |
| 604117 (3) | |
| von Hippel-Lindau disease, modification of, | CCND1, PRAD1, BCL1 |
| 193300 (3) | |
| von Hippel-Lindau syndrome, 193300 (3) | VHL |
| von Willebrand disease (3) | VWF, F8VWF |
| Waardenburg-Shah syndrome, 277580 (3) | EDNRB, HSCR2, ABCDS |
| Waardenburg-Shah syndrome, 277580 (3) | SOX10, WS4 |
| Waardenburg syndrome/albinism, digenic, | TYR |
| 103470 (3) | |
| Waardenburg syndrome/ocular albinism, | MITF, WS2A |
| digenic, 103470 (3) | |
| Waardenburg syndrome, type I, 193500 (3) | PAX3, WS1, HUP2, CDHS |
| Waardenburg syndrome, type IIA, 193510 | MITF, WS2A |
| (3) | |
| Waardenburg syndrome, type III, 148820 (3) | PAX3, WS1, HUP2, CDHS |
| Waardenburg syndrome, typ IID, 608890 (3) | SNAI2, SLUG, WS2D |
| Wagner syndrome, 143200 (3) | COL2A1 |
| WAGR syndrome, 194072 (3) | WT1 |
| Walker-Warburg syndrome, 236670 (3) | FCMD |
| Walker-Warburg syndrome, 236670 (3) | POMT1 |
| Warburg micro syndrome 1, 600118 (3) | RAB3GAP, WARBM1, P130 |
| Warfarin resistance, 122700 (3) | VKORC1, VKOR, VKCFD2, FLJ00289 |
| Warfarin sensitivity, 122700 (3) | CYP2C9 |
| Warfarin sensitivity (3) | F9, HEMB |
| Watson syndrome, 193520 (3) | NF1, VRNF, WSS, NFNS |
| Weaver syndrome, 277590 (3) | NSD1, ARA267, STO |
| Wegener-like granulomatosis (3) | TAP2, ABCB3, PSF2, RING11 |
| Weill-Marchesani syndrome, dominant, | FBN1, MFS1, WMS |
| 608328 (3) | |
| Weill-Marchesani syndrome, recessive, | ADAMTS10, WMS |
| 277600 (3) | |
| Weissenbacher-Zweymuller syndrome, | COL11A2, STL3, DFNA13 |
| 277610 (3) | |
| Werner syndrome, 277700 (3) | RECQL2, RECQ3, WRN |
| Wernicke-Korsakoff syndrome, susceptibility | TKT |
| to, 277730 (3) | |
| Weyers acrodental dysostosis, 193530 (3) | EVC |
| WHIM syndrome, 193670 (3) | CXCR4, D2S201E, NPY3R, WHIM |
| White sponge nevus, 193900 (3) | KRT13 |
| White sponge nevus, 193900 (3) | KRT4, CYK4 |
| Williams-Beuren syndrome, 194050 (3) | ELN |
| Wilms tumor, 194070 (3) | BRCA2, FANCD1 |
| Wilms tumor, somatic, 194070 (3) | GPC3, SDYS, SGBS1 |
| Wilms tumor susceptibility-5, 601583 (3) | POU6F2, WTSL, WT5 |
| Wilms tumor, type 1, 194070 (3) | WT1 |
| Wilson disease, 277900 (3) | ATP7B, WND |
| Wiskott-Aldrich syndrome, 301000 (3) | WAS, IMD2, THC |
| Witkop syndrome, 189500 (3) | MSX1, HOX7, HYD1, OFC5 |
| Wolcott-Rallison syndrome, 226980 (3) | EIF2AK3, PEK, PERK, WRS |
| Wolff-Parkinson-White syndrome, 194200 | PRKAG2, WPWS |
| (3) | |
| Wolfram syndrome, 222300 (3) | WFS1, WFRS, WFS, DFNA6 |
| Wolman disease (3) | LIPA |
| Xanthinuria, type I, 278300 (3) | XDH |
| Xeroderma pigmentosum, group A (3) | XPA |
| Xeroderma pigmentosum, group B (3) | ERCC3, XPB |
| Xeroderma pigmentosum, group C (3) | XPC, XPCC |
| Xeroderma pigmentosum, group D, 278730 | ERCC2, EM9 |
| (3) | |
| Xeroderma pigmentosum, group E, DDB- | DDB2 |
| negative subtype, 278740 (3) | |
| Xeroderma pigmentosum, group F, 278760 | ERCC4, XPF |
| (3) | |
| Xeroderma pigmentosum, group G, 278780 | ERCC5, XPG |
| (3) | |
| Xeroderma pigmentosum, variant type, | POLH, XPV |
| 278750 (3) | |
| X-inactivation, familial skewed, 300087 (3) | XIC, XCE, XIST, SXI1 |
| XLA and isolated growth hormone | BTK, AGMX1, IMD1, XLA, AT |
| deficiency, 307200 (3) | |
| Yellow nail syndrome, 153300 (3) | FOXC2, FKHL14, MFH1 |
| Yemenite deaf-blind hypopigmentation | SOX10, WS4 |
| syndrome, 601706 (3) | |
| Zellweger syndrome-1, 214100 (3) | PEX1, ZWS1 |
| Zellweger syndrome, 214100 (3) | PEX10, NALD |
| Zellweger syndrome, 214100 (3) | PEX13, ZWS, NALD |
| Zellweger syndrome, 214100 (3) | PEX14 |
| Zellweger syndrome, 214100 (3) | PEX26 |
| Zellweger syndrome, 214100 (3) | PXF, HK33, D1S2223E, PEX19 |
| Zellweger syndrome, 214100 (3) | PXR1, PEX5, PTS1R |
| Zellweger syndrome-2 (3) | ABCD3, PXMP1, PMP70 |
| Zellweger syndrome-3 (3) | PXMP3, PAF1, PMP35, PEX2 |
| Zellweger syndrome, complementation | PEX16 |
| group 9 (3) | |
| Zellweger syndrome, complementation | PEX3 |
| group G, 214100 (3) | |
| Zlotogora-Ogur syndrome, 225000 (3) | HVEC, PVRL1, PVRR1, PRR1 |

TABLE C

| CELLULAR FUNCTION | GENES |
|---|---|
| PBK/AKT Signaling | PRKCE: ITGAM: ITGA5: IRAK1: PRKAA2: EIP2AK2: |
| | PTEN; EIP4E; PRKCZ; GRK6; MAPK1; TSC1; PLK1; |
| | AKT2; IKBKB; PIK3CA; CDK8; CDKN1B; NPKB2; BCL2; |
| | PIK3CB; PPP2RIA; MAPK8; BCL2L1; MAPK3; T8C2; |
| | ITGA1; KRAS; EIF4BBP1; RELA; PRKCD; NOS3; |
| | PRKAA1; MAPK9; CDK2; PPP2CA; [symbol] ; ITGB7; |
| | YWHAZ; ILK; TPS3; RAF1; IKBKG; RFLB; DYRK1A; |
| | CDKN1A; ITGB1; MAP2K2; JAK1; AKT1; JAK2; PIK3R1; |
| | CHUK; PDPK1; PPP2RSC; CTNNB1; MAP2K1; NPKB1; |
| | PAK3; ITGB3; CCND1; GSK3A; FRAP1; SPN; ITGA2; |
| | TTK; CSNKIA1; BRAF; GSK2B; AKT3; FOXO1; SGK; |
| | HSP96AA1; RPS6KB1 |
| ERK/MAPK Signaling | PRKCB; ITGAM; ITGAS; HSPB1; IRAK1; PRKAA2; |
| | EIP2AK2; RAC1; RAP1A; TLN1; EIP4E; ELK1; GRR6; |
| | MAPK1; RAC2; PLK1; AKT2; PIK3CA; CDK8; CREB1; |
| | PRKC1; PTK2; POS; RPS6KA4; PIK3CB; PPP2RIA |
| | PIK3C3; MAPK8; MAPK3; ITGA1; ETS1; KRAS; MYCN; |
| | EIF4EBP1; PPARG; PRKCD; PRKAA1; MAPK9; SRC; |
| | CDK2; PPP2CA; PIMI; PIK2C2A; ITGB7; YWHAZ; |
| | PPP1CC; KSR1; PXN; RAF1; FYN; DYRKIA; ITGB1; |
| | MAP2K2; PAK4; PIK3R1; STAT3; PPP2RSC; MAP2K1; |
| | PAK3; ITGB3; ESR1; ITGA2; MYC; TTK; CSNK1A1; |
| | CRKL; BRAF; ATF4; PRKCA; SRF; STAT1; SGK |
| [symbol] Receptor | RAC1; TAF4B; EP300; SMAD2; TRAF6; PCAF; ELK1; |
| Signaling | MAPK1; SMAD3; AKT2; IKBKB; NCOR2; UBE21; |
| | PIK3CA; CREB1; [symbol] ; HSPA5; NFKB2; BCL2; |
| | MAP3K14; STAT5B; PIK3CB; PIK3C3; MAPK8; BCL2L1; |
| | MAPK3; TSC22D3; MAPK10; [symbol] ; KRAS; MAPK13; |
| | RELA; STAT5A; MAPK9; NOS2A; PBX1; NB3C1; |
| | PIK3C2A; CDKNIC; TRAP2; SERPINE1; NCOA3; |
| | MAPK14; TNF; RAF1; IKBKG; MAP3K7; CREBBP; |
| | CDKNIA; MAP2K2; JAK1; IL8; NCOA2; AKT1; JAK2; |
| | PIK3R1; CHUK; STAT3; MAP2K1; NFKB1; TGFBR1; |
| | ESR1; SMAD4; CEBPB; JUN; AR; AKT3; CCL2; MMP1; |
| | STAT1; IL6; HSP90AA1 |
| Axonal Guidance Signaling | PRKCE; ITGAM; ROCK1; ITGAS; CXCR4; ADAM12; |
| | JGF1; RAC1; RAP1A; EIP4E; PRKCZ; NRP1; NTRK2; |
| | ARHGEF7; SMO; ROCK2; MAPK1; PGf; RAC2; |
| | PTPN11; GNAS; AKT2; PIK3CA; ERBB2; PRKC1; PTK2 |
| | CFL1; GNAQ; PTK3CB; CXCL12; PIK3C3; WNT11; |
| | PRKD1; GNB2L1; ABL1; MAPK3; ITGA1; KRAS; RHOA; |
| | PRKCD; PIK3C2A; ITGB7; GL12; PXN; VASP; RAF1; |
| | PYN; ITGB1; MAP2K2; PAK4; ADAM17; AKT1; PIK3R1; |
| | GLI1; WNTSA; ADAM10; MAP2K1; PAK3; ITGB3; |
| | CDC42; VEGFA; ITGA2; EPHAN; CRKL; RND1; GSK3B; |
| | AKT3; PRKCA |
| Ephrin Receptor Signaling | PRKCE; ITGAM; ROCK1; ITGA5; CXCR4; IRAK1; |
| | PRKAA2; EIP2AK2; RAC1; RAP1A; GRK6; ROCK2; |
| | MAPK1; PGF; RAC2; PTPN11; GNAS; PLK1; AKT2; |
| | DOK1; CDK8; CREB1; PTK2; CFL1; GNAQ; MAP3K14; |
| | CXCL12; MAPK8; GNB2L1; ABL1; MAPK3; ITGA1; |
| | KRAS; RHQA; PRKCD; PRKAA1; MAPK9; SRC; CDK2; |
| | PIM1, ITGB7; PXN; RAF1; PYN; DYRKIA; ITGB1; |
| | MAP2K2; PAK4; AKT1; JAK2; STAT3; ADAM10; |
| | MAP2K1; PAK3; ITGB3; CDC42; VEGFA; ITGA2; |
| | EPHA8; TTN; CSNKIA1; CRKL; BRAF; PTPN13; ATF4; |
| | AKT3; SGK |
| Actin Cytoskoleton | ACTN4; PRKCE; ITGAM; ROCK1; ITGAS; IRAK1; |
| Signaling | PRKAA2; EIP2AK2; RAC1; INS; ARHGEF7; GRK6; |
| | ROCK2; MAPK1; RAC2; PLK1; AKT2; PIK3CA; CDK8; |
| | PTK2; CFL1; PIK3CB; MYH9; DIAPH1; PIK3C3; MAPK8; |
| | F2R; MAPK3; SLC9A1; ITGA1; KRAS; RHOA; PRKCD; |
| | PRKAA1; MAPK9; CDK2; PIM1; PIK3C2A; ITGB7; |
| | PPPICC; PXN; VIL2; RAF1; [symbol] ; DYRKIA; ITGB1; |
| | MAP2K2; PAK4; PIP5K1A; PIK3R1; MAP2K1; PAK3; |
| | ITGB3; CDC42; APC; ITGA2; TTK; CSNKIA1; CRKL; |
| | BRAF; VAV3; SOK |
| Huntington's Disease | PRKCE; IGF1; [symbol] ; RCOR1; PRKCZ; HDAC4; TGM2; |
| Signaling | MAPK1; CAPNS1; AKT2; EGFR; NCOR2; SP1; CAPN2; |
| | PIK3CA; HDAC5; CREB1; PRKC1; HSPA5; REST; |
| | GNAQ; PIK3CB; PIK3C3; MAPK8; IGIR; PRKD1; |
| | GNB2L1; BCL2L1; CAPN1; MAPK3; CASP8; HDAC2; |
| | HDAC7A; PBKCD; HDAC11; MAPK9; HDAC9; PIK3C2A; |
| | HDAC3; TP53; CASP9; CREBBP; AKT1; PIK3R1; |
| | PDPK1; CABP1; APAF1; FRAP1; CASP2; JUN; BAX; |
| | ATF4; AKT3; PRKCA; CLTC; [symbol] ; HDAC6; CA8P3 |
| Apoplosis Signaling | PRKCE; ROCK1; BID; IRAK1; PRKAA2; EIF2AK2; BAK1; |
| | BIRC4; GRK6; MAPK1; CAPN81; PLK1; AKT2; IKBKB; |
| | CAPN2; CDK8; FA8; NFKB2; BCL2; MAP3K14; MAPK8; |
| | BCL2L1; CAPN1; MAPK3; CASP8; KRA8; RBLA; |
| | PRKCD; PRKAA1; MAPK9; CDK2; PIM1; [symbol] ; TNF; |
| | RAP1; IKBKG; REL8; CASP9; DYRK1A; MAP2K2; |
| | CHUK; APAF1; MAP2K1; NFKB1; PAK3; LMNA; CASP2; |
| | BIRC2; TTK; CSNK1A1; BRAF; BAX; PRKCA; 8GK; |
| | CASP3; BIRC3; PARP1 |
| B Cell Receptor Signaling | RAC1; PTEN; LYN; ELK1; MAPK1; RAC2; PTPN11; |
| | AKT2; IKBKB; PIK3CA; CREB1; SYK; NFKB2; CAMK2A; |
| | MAP3K14; PIK3CB; PIK3C3; MAPK8; BCL2L1; ABL1; |
| | MAPK3; ET81; KRA8; MAPK13; RELA; PTPN6; MAPK9; |
| | EGR1; PIK3C2A; BTK; MAPK14; RAF1; IKBKG; RELB; |
| | MAP3K7; MAP2K2; AKT1; PIK3R1; CHUK; MAP2K1; |
| | NFKB1; CDC42; G8K3A; FRAP1; BCL6; BCL10; JUN; |
| | GBK3B; ATF4; AKT3; VAV3; RPS6KB1 |
| Leukocyte Extravasation | ACTN4; CD44; PRKCE; ITGAM; ROCK1; CXCR4; CYBA; |
| Signaling | RAC1; RAPIA; PRKCZ; ROCK2; RAC2; PTPN11; |
| | MMP14; PIK3CA; PRKC1; PTK2; PIK3CB; CXCL12; |
| | PIK3C3; MAPK8; PRKD1; ABL1; MAPK10; CYBB; |
| | MAPK13; RHOA; PRRCD; MAPK9; 8RC; PIK3C2A; BTK; |
| | MAPK14; NOX1; PXN; VIL2; VASP; ITGB1; MAP2K2; |
| | CTNND1; PIK3R1; CTNNB1; CLDN1; CDC42; F11R; ITK; |
| | CRKL; VAV3; CTTN; PRRCA; MMP1; MMP9 |
| Integrin Signaling | ACTN4; ITGAM; ROCK1; ITGA5; RAC1; PTEN; RAP1A; |
| | TLN1; ARHGEF7; MAPK1; RAC2; CAPN81; AKT2; |
| | CAPN2; PIK3CA; PTK2; PIK3CB; PIK3C3; MAPK8; |
| | CAV1; CAPN1; ABL1; MAPK3; ITGA1; KBA8; RHOA; |
| | SRC; PIK3C2A; ITGB7; PPP1CC; ILK; PXN; VASP; |
| | RAP1; FYN; ITGB1; MAP2K2; PAK4; AKT1; [symbol] ; |
| | TNK2; MAP2K1; PAK3; ITGB3; CDC42; RND3; ITGA2; |
| | CRKL; BRAF; GSK3B; AKT3 |
| Acute Phase Response | IRAK1; SOD2; MYD88; TRAF6; ELK1; MAPK1; FTPN11; |
| Signaling | AKT2; IKBKB; PIK3CA; FO8; NFKB2; MAP3K14; |
| | PIK3CB; MAPK8; RIPK1; MAPK3; IL6ST; KRAS; |
| | MAPK13; IL6R; RELA; SOCS1; MAPK9; FTL; NR3C1; |
| | TRAP2; SERPINE1; MAPK14; TNF; RAF1; PDK1; |
| | IKBKG; REL8; MAP3K7; MAP2K2; AKT1; JAR2; PIK3R1; |
| | CHUK; STAT3; MAP2K1; NFKB1; FRAP1; CEBPB; JUN; |
| | AKT3; [symbol] ; IL6 |
| PTEN Signaling | ITGAM; ITGA5; RAC1; PTEN; PRKCZ; BCL2L11; |
| | MAPK3; RAC2; AKT2; EGFR; IKBKB; CBL; PIK3CA; |
| | CDKNIB; PTK2; [symbol] ; BCL2; PIK3CB; BCL2L1; |
| | MAPK3; ITGA1; KRA8; ITGB7; ILK; PDGFRB; IN8R; |
| | RAF1; IKBKG; CASP9; CDKN1A; ITGBl; MAP2K2; |
| | AKT1; PIK3R1; CHUK; PDGFRA; PDPK1; MAP2K1; |
| | NFKB1; ITGB3; CDC42; CCND1; GSK3A; ITGA2; |
| | G8K3B; AKT3; FOXO1; CASP3; RPS6KB1 |
| p53 Signaling | PTEN; EP306; BBC3; PCAF; FASN; BRCA1; GADD45A; |
| | BIRC5; AKT2; PIK3CA; CHEK1; TP53INP1; BCL2; |
| | PIK3CB; PIK3C3; MAPK8; THBS1; ATR; BCL2L1; E2F1; |
| | PMAIP1; CHEK2; TNFRSF10B; TP73; RB1; HDAC9; |
| | CDK2; PIK3C2A; MAPK14; TP53; LRDD; CDKNIA; |
| | HIPK2; AKT1; PIK3R1; RRM2B; APAF1; CTNNB1; |
| | SIRT1; CCND1; PRKDC; ATM; SPN; CDKN2A; JUN; |
| | SNA12; GSK3B; BAX; AKT3 |
| Aryl Hydrocarbon Receptor | HSPB1; EP300; FASN; TGM2; RXRA; MAPK1; NQO1; |
| Signaling | NCOR2; SP1; ARNT; CDKN1B; [symbol] ; CHEK1; |
| | SMARCA4; NFKB2; MAPK8; ALDH1A1; ATR; E2F1; |
| | MAPK3; NRIP1; CHEK2; RELA; TP73; GSTP1; RB1; |
| | SRC; CDK2; AHR; NFE2L2; NCOA3; [symbol] ; TNF; |
| | CDKN1A; NCOA2; APAF1; NFKB1; CCND1; ATM; ESR1; |
| | CDKN2A; MYC; JUN; ESR2; BAX; IL6; CYPIB1; |
| | HSP90AA1 |
| Xenobiotic Metabolism | PRRCE; EP300; PRKCZ; RXRA; MAPK1; NQO1; |
| Signaling | NCOR2; PIK3CA; ARNT; PRKC1; NFKB2; CAMK2A; |
| | PIK3CB; PPP2R1A; PIK3C3; MAPK8; PRKD1; |
| | ALDH1A1; MAPK3; NRIP1; KRAS; MAPK13; PRKCD; |
| | GSTP1; MAPK9; NOS2A; ABCB1; AHR; PPP2CA; FTL; |
| | NFE2L2; PIK3C2A; PPARGCIA; MAPK14; TNF; RAF1; |
| | CREBBP; MAP2K2; PIK3R1; PPP2R5C; MAP2K1; |
| | NFKB1; KEAP1; PRKCA; EIP2AK3; IL6; CYP1B1; |
| | HSP90AA1 |
| SAPK/JNK Signaling | PRKCE; IRAK1; PRKAA2; EIP2AK2; RAC1; ELK1; |
| | GRK6; MARK1; GADD45A; RAC2; PLK1; AKT2; PIK3CA; |
| | FADD; CDK8; PIK3CB; PIK3C3; MAPK8; RIPK1; |
| | GNB2L1; IRS1; MAPK3; MAPK10; DAXX; KRAS; |
| | PRKCD; PRKAA1; MAPK9; CDR2; PIM1; PIK3C2A; |
| | TRAF2; TP53; LCK; MAP3K7; DYRK1A; MAP2K2; |
| | PIK3R1; MAP2K1; PAK3; CDC42; JUN; TTK; C8NKIA1; |
| | CRKL; BRAF; SGK |
| [symbol] Signaling | PRKAA2; EP300; INS; SMAD2; TRAF6; PPARA; FASN; |
| | PXRA; MAPK1; SMAD3; GNA8; IKBKB; NCOR2; |
| | ABACA1; GNAQ; NFKB2; MAP3K14; STAT5B; MAPK8; |
| | IRS1; MAPK3; KRAS; RELA; PRKAA1; PPARGCIA; |
| | INCOA3; MAPK14; INSR; RAF1; IKBKG; RELB; MAP3K7; |
| | CREBBP; MAP2K2; JAK2; CHUK; MAP2K1; NPKB1; |
| | TGFBR1; SMAD4; JUN; IL1R1; PRKCA; IL6; HSP90AA1; |
| | ADIPOQ |
| NF-KB Signaling | IRAK1; EIP2AK2; EP300; IN8; MYD88; PRKCZ; TRAF6; |
| | TBK1; AKT2; EGFR; IKBKB; PIK3CA; BTRC; NFKB2; |
| | MAP3K14; PIK3CB; PIK3C3; MAPK8; RIPK1; HDAC2; |
| | KRAS; RELA; PIK3C2A; TRAF2; TLR4; PDGFRH; TNF; |
| | [symbol] ; LCK; IKBKG; RELB; MAP3K7; CREBBP; AKT1; |
| | PIK3R1; CHUK; PDGFRA; NFKB1; TLR2; [symbol] ; |
| | GSK3B; AKT3; TNFAIP3; ILIR1 |
| Neuregulin Signaling | ERBB4; PRKCE; ITGAM; ITGAS; PTEN; PRKCZ; ELK1; |
| | MAPK1; PTPN11; AKT2; EGFR; ERBB2; PRKCl; |
| | CDKN1B; STAT5B; PRKD1; MAPK3; ITGA1; KRAS; |
| | PRKCD; STAT5AS; SRC; ITGB7; RAP1; ITGB1; MAP2K2; |
| | ADAM17; ART1; PIK3R1; PDPK1; MAP2K1; ITGB3; |
| | EREG; FRAP1; PSEN1; ITGA2; MYC; NRG1; CRKL; |
| | AKT3; PRKCA; HSP90AA1; RPS6KB1 |
| Wnt & Beta Catenin | CD44; EP300; LRP6; DVL3; C8NK1E; GJA1; SMO; |
| Signaling | AKT2; PIN1; CDH1; 8TRC; GNAQ; MARK2; PPP2R1A; |
| | WNT11; SRC; DKK1; PPP2CA; SOX6; SFRP2; ILK; |
| | LEP1; SOX9; TP53; MAP3K7; CREBBP; [symbol] ; AKT1; |
| | PPP2R5C; WNT5A; LRP5; CTNNB1; TGFBR1; CNND1; |
| | GSK3A; DVL1; APC; CDKN2A; MYC; CSNKIA1; GSK3B; |
| | AKT3; SOX2 |
| Insulin Receptor Signaling | PTEN; IN8; EIP4E; PTPN1; PRKCZ; MAPK1; TSC1; |
| | PTPN11; AKT2; CBL; PIK3CA; PRKCL; PIK3CB; PIK3C3; |
| | MAPK8; [symbol] ; MAPK3; TSC2; KRAS; EIF4EBP1; |
| | SLC2A4; PIK3C2A; PPP1CC; INSR; RAF1; FYN; |
| | MAP2K2; JAK1; AKT1; JAK2; PIK3R1; PDPk1; MAP2K1; |
| | GSK3A; FRAP1; CRKL; OSK3B; AKT3; FOXO1; SGK; |
| | RPS6KB1 |
| IL-6 Signaling | HSPB1; TRAF6; MAPKAPK2; ELK1; MAPK1; PTPN11; |
| | IKBKB; FOS; NFKB2; MAP3K14; MAPK8; MAPK3; |
| | MAPK10; IL6ST; KRAS; MAPK13; IL6R; RELA; [symbol] ; |
| | MAPK9; ABCB1; [symbol] ; MAPK14; TNF; RAF1; IKBKG; |
| | RELB; MAP3K7; MAP2K2; IL8; JAK2; CHUK; STAT3; |
| | MAP2K1; NFKB1; CEBPB; JUN; [symbol] ; SRF; IL6 |
| Hepatic Cholcatasis | PRKCE; IRAK1; INS; MYD88; PRKCZ; TRAF6; PPARA; |
| | RXRA; IKBKB; PRKCI; NFKB2; MAP3K14; MAPK8; |
| | PRKD1; MAPK10; RELA; PRKCD; MAPK9; ABCB1; |
| | [symbol] ; TLR4; TNF; INSR; [symbol] ; RELB; MAP3K7; IL8; |
| | CHUK; NR1H2; TJP2; NFKB1; ESR1; SREBF1; FGFR4; |
| | JUN; ILIR1; PRKCA; IL6 |
| IGE-1 Signaling | IGF1; PRKCZ; ELK1; MAPK1; PTPN11; NEDD4; AKT2; |
| | PIK3CA; PRKC1; PTK2; [symbol] ; PIK3CB; PIK3C3; MAPK8; |
| | JGFIR; IRS1; MAPK3; IGFBP7; KRAS; PIK3C2A; |
| | YWHAZ; PXN; RAF1; CASP9; MAP2K2; AKT1; PIK3R1; |
| | PDPK1; MAP2K1; IGFBP2; SFN; JUN; CYR61; AKT3; |
| | FOXO1; SRF; CTGF; RPS6RB1 |
| NRF2-mediated Oxidative | PRKCE; EP300; SOD2; PRKCZ; MAPK1; SQSTM1; |
| Stress Response | NQO1; PIK3CA; PRKC1; FOS; PIK3CB; PIK3C3; MAPK8; |
| | PRKD1; MAPK3; KRAS; PRKCD; GSTP1; MAPK9; FTL; |
| | NFE2L2; PIK3C2A; MAPK14; RAF1; MAP3K7; CREBBP; |
| | MAP2K2; AKT1; PIK3R1; MAP2K1; PPIB; JUN; KEAP1; |
| | GSK3B; ATF4; PRKCA; EIF2AK3; HSP90AA1 |
| Hepatic Fibrosis/Hepatic | EDN1; IGF1; KDR; FLT1; SMAD2; FGFR1; MET; PGF; |
| Stellate Cell Activation | SMAD3; EGFR; FAS; CSF1; NFKB2; BCL2; MYH9; |
| | IGFIR; IL6R; RELA; TLR4; PDGFRB; TNF; RELB; ILS; |
| | PDGFRA; NFKB1; TGFBR1; SMAD4; VEGFA; BAX; |
| | ILIR1; CCL2; HGF; MMP1; STAT1; IL6; CTGF; MMP9 |
| PPAR Signaling | EP300; INS; TRAF6; PPARA; RXRA; MAPK1; IKBKB; |
| | NCOR2; FOS; NFKB2; MAP3K14; STAT5B; MAPK3; |
| | NRIP1; KRAS; PPARG; RELA; STAT5A; TRAP2; |
| | PPARGCIA; PDGFRB; TNF; INSR; RAF1; IKBKG; |
| | RELB; MAP3K7; CREBBP; MAP2K2; CHUR; PDGFRA; |
| | MAP2K1; NFKB1; JUN; ILIR1; HSP90AA1 |
| Fc Epsilon R1 Signaling | PRKCE; RAC1; PRKCZ; LYN; MAPK1; BAC2; PTPN11; |
| | ART2; PIK3CA; SYK; PRKC1; PIK3CB; PIK3C3; MAPK8; |
| | PRKD1; MAPK3; MAPK10; KRAS; MAPK13; PRKCD; |
| | MAPK9; PIK3C2A; BTK; MAPK14; TNF; RAF1; FYN; |
| | MAP2K2; AKT1; PIK3R1; PDPK1; MAP2K1; AKT3; |
| | VAV3; PRKCA |
| G-protein Coupled | PRKCE; RAP1A; RGS16; MAPK1; GNAS; AKT2; IKBKB; |
| Receptor Signaling | PIK3CA; CREB1; GNAQ; NFKB2; CAMK2A; PIK3CB; |
| | PIK3C3; MAPK3; KRAS; RELA; SRC; PIK3C2A; RAF1; |
| | IKBKG; RELB; FYN; MAP2K2; AKT1; PIK3R1; CHUK; |
| | PDPK1; STAT3; MAP2K1; NFKB1; BRAF; ATF4; AKT3; |
| | PRKCA |
| [symbol] Phosphate | PRKCE; RAK1; PRKAA2; EIP2AK2; PTEN; GRK6; |
| Metabolism | MAPK1; PLK1; AKT2; PIK3CA; CDK8; PIK3CB; PIK3C3; |
| | MAPK8; MAPK3; PRKCD; PRKAA1; MAPK9; CDK2; |
| | PIM1; PIK3C2A; DVRKIA; MAP2K2; PIP5KIA; PIK3R1; |
| | MAP2K1; PAK3; ATM; TTK; CSNKIA1; BRAF; SGK |
| PDGF Signaling | EIP2AK2; ELK1; ABL2; MAPK1; PIK3CA; FO8; PIK3CB; |
| | PIK3C3; MAPK8; CAV1; ABL1; MAPK3; [symbol] ; SRC; |
| | PIK3C2A; PDGFRB; RAF1; MAP2K2; JAK1; JAK2; |
| | PIK3R1; PDGFRA; STAT3; SPHK1; MAP2K1; MYC; |
| | JUN; CRK1; PRKCA; SRF; STAT1; SPHK2 |
| VEGF Signaling | ACTN4; ROCK1; KDR; FLT1; ROCK2; MARK1; PGF; |
| | AKT2; PIK3CA; ARNT; PTK2; BCL2; PIK3CB; PIK3C3; |
| | BCL2L1; MAPK3; KRAS; HIPIA; NOS3; PIK3C2A; PXN; |
| | RAF1; MAP2K2; ELAVL1; AKT1; PIK3R1; MAP2K1; SFN; |
| | VEGFA; AKT3; FOXO1; PRKCA |
| Natural Killer Cell Signaling | PRKCE; RAC1; PRKCZ; MAPK1; RAC2; PTPN11; |
| | KIR2DL3; AKT2; PIK3CA; SYK; PRKC1; PIK3CB; |
| | PIK3C3; PRKD1; MAPK3; KRAS; PRKCD; PTPNG; |
| | PIK3C2A; LCK; RAF1; FYN; MAP2K2; PAK4; AKT1; |
| | PIK3R1; MAP2K1; PAK3; AKT3; VAV3; PRKCA |
| Cell Cycle: G1/s | HDAC4; SMAD3; SUV39H1; HDAC5; CDKNIB; BTRC; |
| Checkpoint Regulation | ATR; ABL1; E2F1; HDAC2; HDAC7A; RB1; HDAC11; |
| | HDAC9; CDK2; E2F2; HDAC2; TP53; CDKN1A; CCND1; |
| | E2F4; ATM; RBL2; 5MAD4; CDKN2A; MYC; NRG1; |
| | GSK3B; RBL1; HDAC6 |
| T Cell Receptor Signaling | RAC1; ELK1; MAPK1; IKBKB; CBL; PIK3CA; [symbol] ; |
| | NFKB2; PIK3CB; PIK3C3; MAPK8; MAPK3; KRAS; |
| | RELA; PIK3C2A; BTK; LCK; RAF1; IKBKG; RELB; PYN; |
| | MAP2K2; PIK3R1; CHUK; MAP2K1; NFKB1; ITK; BCL10; |
| | JUN; VAV3 |
| Death Receptor Signaling | CRADD; HSPB1; BID; BIRC4; TBK1; IKBKB; FADD; |
| | FAS; NFKB2; BCL2; MAP8K14; MAPK8; BIPK1; CASP8; |
| | DAXX; TNFRSP10B; RELA; TRAF2; TNF; IKBKG; RELB; |
| | CASP9; CHUK; APAP1; NFKB1; CASP2; BIRC2; CASP3; |
| | BIRC3 |
| FGF Signaling | RAC1; FGFR1; MET; MAPKAPK2; MAPK1; PTPN11; |
| | AKT2; PIK3CA; CREB1; PIK3CB; PIK3C3; MAPK8; |
| | MAPK3; MAPK13; PTPN6; PIK3C2A; MAPK14; RAF1; |
| | AKT1; [symbol] ; STAT3; MAP2K1; FGFR4; CRKL; ATF4; |
| | ART3; PRKCA; HGF |
| GM-CSF Signaling | LYN; ELK1; MAPK1; PTPN11; AKT2; PIK3CA; CAMK2A; |
| | STAT5B; PIK3CB; PIK3C3; GNB2L1; BCL2L1; MAPK3; |
| | [symbol] ; KRAS; RUNX1; PIM1; PIK3C2A; RAF1; MAP2K2; |
| | AKT1; JAK2; PIK3R1; STAT3; MAP2K1; CCND1; AKT3; |
| | STAT1 |
| Amyotrophic Lateral | BID; IGF1; RAC1; BIRC4; PGF; CAPN81; CAPN2; |
| Sclerosis Signaling | PIK3CA; BCL2; PIK3CB; PIK3C3; BCL2L1; CAPN1; |
| | PIK3C2A; [symbol] ; CASP9; PIK3R1; RAB5A; CASP1; |
| | APAF1; VEGFA; BIRC2; BAX; AKT3; CASP3; BIRC3; |
| JAK/Stat Signaling | PTPN1; MAPK1; PTPN11; AKT2; PIK3CA; STAT5B |
| | PIK3CB; PIK3C3; MAPK3; KRAS; [symbol] ; [symbol] ; |
| | PTPN6; PIK3C2A; RAF1; CDKN1A; MAP2K2; JAK1; |
| | AKT1; JAK2; PIK3R1; STAT3; MAP2K1; FRAP1; AKT3; |
| | STAT1 |
| Nicorinate and Nicotinamide | PRKCE; IRAKJ; PRKAA2; EIF2AK2; GRK6; MAPK1; |
| Metabolism | PLK1; AKT2; CDK8; MAPK8; MAPK3; PRKCD; PRKAA1; |
| | PBEF1; MAPK9; CDK2; PIM1; DYRK1A; MAP2K2; |
| | MAP2K1; PAK3; NT5E; TTK; CSNK1A1; BRAF; SGK |
| Chemokine Signaling | CXCR4; ROCK2; MAPK1; PTK2; [symbol] ; CFL1; GNAQ; |
| | CAMK2A; CXCL12; MAPK8; MAPK3; [symbol] ; MAPK13; |
| | RHOA; CCR3; SRC; PPP1CC; MAPK14; NOX1; RAF1; |
| | MAP2K2; MAP2K1; JUN; CCL2; PRKCA |
| IL-2 Signaling | ELK1; MAPK1; PTPN11; AKT2; PIK3CA; SYK; FOS; |
| | STAT5B; PIK3CB; PIK3C3; MAPK8; MAPK3; KRA5; |
| | SOCS1; STAT5A; PIK3C2A; LCK; RAF1; MAP2K2; |
| | JAK1; AKT1; PIK3R1; MAP2K1; JUN; AKT3 |
| Synaptic Long Term | PRKCE; IGF1; PRKCZ; PRDX6; LYN; MAPK1; [symbol] ; |
| Depression | PRKC1; GNAQ; PPP2R1A, IG1R; PRKD1; MAPK3; |
| | KRAS; GRN; PRKCD; NOS3; NOS2A; PPP2CA; |
| | YWHAZ; RAF1; MAP2K2; PPP2R5C; MAP2K1; PRKCA; |
| Estrogen Receptor | TAF4B; EP306; CARM1; RCAF; MAPK1; NCOR2; |
| Signaling | SMARCA4; MAPK3; NRIP1; KRA8; SRC; NR3C1; |
| | HDAC3; PPARGCIA; RBM9; NCOA3; [symbol] ; CREBBP; |
| | MAP2K2; NCOA2; MAP2K1; PRKDC; ESR1; ESR2 |
| Protein Ubiquitination | TRAF6; SMURF1; BIRC4; BRCA1; UCHL1; NEDD4; |
| Pathway | CBL; UBE21; BTRC; HSPA5; USP7; USP10; FBXW7; |
| | USP9X; STUB1; USP22; B2M; BIRC2; PARK2; USP8; |
| | USP1; VHL; HSP90AA1; BIRC3 |
| IL-10 Signaling | TRAF6; CCR1; ELK1; 1KBKB; SP1; [symbol] ; NFKB2; |
| | MAP3K14; MAPK8; MAPK13; RELA; MAPK14; TNF; |
| | IKBKG; RELB; MAP3K7; JAK1; CHUK; STAT3; NFKB1; |
| | JUN; IL1R1; IL6 |
| VDR/RXR Activation | PRKCE; EP300; PRKCZ; RXRA; GADD45A; HES1; |
| | NCOR2; SP1; PRKC1; CDKN1B; PRKD1; PRKCD; |
| | RUNX2; KLF4; YY1; NCOA3; CDKN1A; NCOA2; SPP1; |
| | LRP5; CEBPB; FOXO1; PRKCA |
| TGF-beta Signaling | EP300; SMAD2; SMURF1; MAPK1; SMAD3; SMAD1; |
| | FO8; MAPK8; MAPK3; KRA8; MAPK9; RUNX2; |
| | SERPINE1; RAF1; MAP3K7; CREBOP; MAPK2K2: |
| | MAP2K1; TGFBB1; SMAD4; JUN; SMAD5 |
| Toll-like Receptor Signaling | IRAK1; EIP2AK2; MYD88; [symbol] ; PPARA; ELK1; |
| | IKBKB; POS; NFKB2; MAP3K14; MAPK8; MAPK13; |
| | RELA; TLR4; MAPK14; IKBKO; RELB; MAP3K7; CHUK; |
| | NFKB1; TLR2; JUN |
| p38 MAPK Signaling | HSPB1; IRAK1; TRAF6; MAPKAPK2; ELK1; FADD; FAS; |
| | CREB1; DDIT3; RPS6KA4; DAXX; MAPK13; TRAF2; |
| | MAPK14; TNF; [symbol] ; TGFBR1; MYC; ATF4; ILIR1; |
| | SRF; STAT1 |
| Neurotrophin/TRK Signaling | NTRK2; MAPK1; PTPN11; PIK3CA; CREB1; [symbol] ; |
| | PIK3CB; PIK3C3; MAPK8; MAPK3; KRA8; PIK3C2A; |
| | RAF1; MAP2K2; AKT1; PIK3R1; PDPK1; MAP2K1; |
| | CDCA2; JUN; ATF4 |
| FXR/RXR Activation | INS; PPARA; FASN; RXRA; AKT2; SDC1; MAPK8; |
| | APOB; MAPK10; PPARG; MTTP; MAPK9; PPARGCIA; |
| | TNF; CREBBP; AKT1; SREBF1; FGFR4; ART3; FOXG1 |
| Synaptic Long Term | PRKCE; RAPIA; EP300; PRKCZ; MAPK1; CREB1; |
| Potentiation | PRKC1; GNAQ; CAMK2A; PRKCZ; MAPK1; CREB1; |
| | PRKCD; PPP1CC; RAF1; CREBBP; MAP2K2; MAP2K1; |
| | ATF4; PHKCA |
| Calcium Signaling | RAP1A; EP300; HDAC4; MAPK1; HDAC5; CREB1; |
| | CAMK2A; MVH9; MAPK3; HDAC2; HDAC7A; HDAC11; |
| | HDAC9; HDAC3; CREBBP; CALR; CAMKK2; ATF4; |
| | HDAC6 |
| EGF Signaling | ELK1; MAPK1; EGFR; PIK3CA; [symbol] ; PIK3CB; PIK3C3; |
| | MAPK8; MAPK3; PIK3C2A; RAF1; JAK1; PIK3R1; |
| | STAT3; MAP2K1; JUN; PRKCA; SRF; STAT1 |
| Hypoxia Signaling in the | EDN1; PTEN; EP300; NQO1; UBE21; CREB1; ARNT; |
| Cardiovascular System | HIF1A; SLC2A4; NOS3; TP53; LOHA; AKT1; ATM; |
| | VEGFA; JUN ATF4; VHL; HSP90AA1 |
| [symbol] Mediated Inhibition | IRAK1; MYD88; TRAF6; PPARA; RXRA; ABCA1; |
| of RXR Function | MAPK8; ALDH1A1; G5IT1; MAPK9; ABCB1; TRAF2; |
| | TLR4; TNF; MAP3K7; NR1H2; SREBF1; JUN; IL1R1; |
| LXR/RXR Activation | FASN; RXRA; NCOR2; ABCA1; NFKB2; IRF3; RELA; |
| | NOS2A; TLR4; TNF; RELB; LDLR; NR1H2; NFKB1; |
| | SREBF1; ILIR1; CLL2; IL6; MMP9 |
| Amyloid Processing | PRKCE; CSNKIE; MAPK1; CAPNS1; AKT2; CAPN2; |
| | CAPN1; MAPK3; MAPK13; MAPT; MAPK14; AKT1; |
| | PSEN1; CSNK1A1; GSK3B; ART3; APP |
| IL-4 Signaling | AKT2; PIK3CA; PIK3CB; PIK3C3; IR81; KRA8; SOC81; |
| | PTPN8; NR3C1; PIK3C2A; JAK1; AKT1; JAK2; PIK3R1; |
| | FRAP1; ART3; RPS6KB1 |
| Cell Cycle: G2/M DNA | EP300; PCAF; BRCA1; GADD45A; PLK1; BTRC; |
| Damage Checkpoint | CHEK1; ATR; CHEK2; YWHAZ; [symbol] ; CDKN1A; |
| | PRKDC; ATM; SPN; CDKN2A |
| [symbol] oxide Signaling in the | KDR; FLT1; PGF; AKT2; PIK3CA; PIK3CB; PIK3C3; |
| Cardiovascular System | CAV1; PRKCD; [symbol] ; PIK3C2A; AKT1; PIK3R1; |
| | VEGFA; AKT3; HSP90AA1 |
| Purine Metabolism | NME2; SMARCA4; MYH9; RRM2; ADAR; EIP2AK4; |
| | PKM2; ENTPD1; RAD51; RRM2B; [symbol] ; RAD51C; |
| | NT5E; POLD1; NME1 |
| cAMP-mediated Signaling | RAP1A; MAPK1; GNAS; CREB1; CAMK2A; MAPK3; |
| | SRC; RAF1; MAP2K2; STAT3; MAP2K1; BRAP; ATF4 |
| [symbol] Dysfunction | SOD2; MAPK8; CASP8; MAPK10; MAPK0; CASP9; |
| | PARK7; PSEN1; PARK2; APP; CASP3 |
| Notch Signaling | HES1; JAG1; NUMB; NOTCH4; ADAM17; NOTCH2; |
| | PSEN1; NOTCH3; NOTCH1; DLL4 |
| Endoplasmic Reticulum | HSPA5, MAPK8; XBP1; TRAF2; ATF6; CASP9; ATF4; |
| Stress Pathway | EIP2AK3; CASP3 |
| Pyrimidine Metabolism | NME2; A1CDA; RRM2; EIP2AK4; ENTPD1; RRM2B; |
| | NT5E; POLD1; NME1 |
| Parkinson's Signaling | [symbol] ; MAPK8; MAPK13; MAPK14; CASP9; PARk7; |
| | PARK2; CASP3 |
| Cardiac & Beta [symbol] | [symbol] ; GNAQ; PPP2R1A; GNB2L1; PPP2CA; [symbol] ; |
| Signaling | PPP2R5C |
| Glycolysis-Gluconeogensis | HK2; GCK; GP1; ALDBIA1; PKM2; LDHA; HK1 |
| Interferon Signaling | IRF1; SOCS1; JAK1; JAK2; IFITM1; STAT1; IFIT3; |
| Sonic Hedgehog Signaling | ARRB2; SMO; GLI2; DYRKIA; GLH; GSK3B; DYRK1B |
| Glycerophospholipid | PLD1; GRN; GPAM; YWHAZ; SPHK1; SPHK2 |
| Metabolism | |
| Phospholipid Degradation | PRDX6; PLD1; GRN; YWHAZ; SPHK1; SPHK2 |
| Trytophen Metabolism | SIAH2; PRMT5; NEDD4; ALDH1A1; CYP1B1; SIAB1 |
| Lysine Degradation | SUV39H1; EHMT2; NSD1; SETD7; PPP2R5C |
| Nucleotide Excision Repair | ERCC5; ERCC4; XP4; XPC; ERCC1 |
| Pathway | |
| Starch and Sucrose | UCHL1; BK2; GCK; GP1; HK1 |
| Metabolism | |
| [symbol] Metabolism | NQO1; HK2; GCK; HK1 |
| [symbol] Acid | PRDX6; GRN; YWHAZ; CYP1B1 |
| Metabolism | |
| [symbol] Rhythm Signaling | C8NK1E; CREB1; ATF4; NR1D1 |
| Congulation System | BDKRB1; F2R; SERPINE1; F3 |
| Dopamine Receptor | PPP2R1A; PPP2CA; PPP1CC; PPP2R5C |
| Signaling | |
| [symbol] Metabolism | IDH2; GSTP1; ANPEP; IDH1 |
| Glycerolipid Metabolism | ALDHIA1; GPAM; SPHK1; SPHK2 |
| Linoleic Acid Metabolism | PRDX6; GRN; YWHAZ; CY1B1 |
| Methionine Metabolism | DNMT1; DNMT3B; AHCY; DNMT3A |
| [symbol] Metabolism | GLO1; ALDH1A1; PKM2; LDHA |
| Arginine and Proline | ALDHIA1; NOS; NOS2A |
| Metabolism | |
| [symbol] Signaling | PRDX6; GRN; YWHAZ |
| Fructose and Mannose | HK; GCK; HK1 |
| Metabolism | |
| Galactose Metabolism | HK2; GCK; HK1; |
| [symbol] , [symbol] and | PRDX6; PRDX1; TYR |
| Lignin Biosynthesis | |
| Antigen [symbol] | CALR; B2M |
| Pathway | |
| Biosynthesis of Steriode | NQO1; DHCR7 |
| Butanoate Metabolism | ALDH1A1; NLGN1 |
| Citrate Cycle | IDH2; IDH1 |
| Fatty Acid Metabolism | ALDIA1; CYP1B1 |
| Glyecrophospholipid | PRDX6; CHKA |
| Metabolism | |
| Histidiac Metabolism | PRMT5; ALDHIA1 |
| Inositol Metabolism | ERO1L; APEX1 |
| Metabolism of Xenobiotics | GSTP1; CYP1B1 |
| by Cytochrome p450 | |
| Methane Metabolism | PRDX6; PRDX1 |
| Pheylalanine Metabolism | PRDX6; PRDX1 |
| [symbol] Metabolism | ALDHIA1; LDHA |
| Seleoamino Acid | PRMT5; [symbol] |
| Metabolism | |
| Sphingolipid Metabolism | SPHK1; SPHK2 |
| Aminophosphonate | PRMT5 |
| Metabolism | |
| Ascorbate and [symbol] | PRMT5 |
| Metabolism | |
| Bile Acid Biosynthesis | ALDHIA1 |
| Cysteine Metabolism | LDHA |
| Fatty Acid Biosynthesis | FASN |
| Glutamate Receptor | GNB2L1 |
| Signaling | |
| NRF2-mediated Oxidative | PRDX1 |
| Stress Response | |
| Pentose and Phosphate | GP1 |
| Pathway | |
| Pentose and [symbol] | UCHL1 |
| Interconversions | |
| Retinol Metabolism | ALDH1A1 |
| Riboflavin Metabolism | TYR |
| Tyrosine Metabolism | PRMTS |
| Tyrosine Metabolism | TYR |
| Ubiquinone Biosynthesis | PRMTS |
| Valine, [symbol] and | ALDH1A1 |
| Isoleucine Degradation | |
| Glycino, Serine and | CHKA |
| Threonine Metabolism | |
| Lysine Degradtion | ALDHIA1 |
| Pain/Taste | TRPM5; TRPA1 |
| Pain | TRPM7; TRPC5; TRPC6; TRPC1; [symbol] ; [symbol] ; Grk2; |
| | Trpa1; Pome; Cgrp; Crf; Pkac; Era; Nr2h; [symbol] ; Prkaca; |
| | Prkacb; Prkar1a; Prkar2a |
| Mitochondrial Function | AIF; CytC; SMAC (Diablo); Aifm-1; Aifm-2 |
| Developmental Neurology | BMP-4; Chordin (Chrd); Noggin (Nog); WNT (Wnt2; |
| | Wnt2b; Wnt3a; Wnt4; Wnt5a; Wnt6; Wnt7b; [symbol] ; |
| | Wnt9a; Wnt9b; Wnt10a; Wnt10b; Wnt16j; beta-catenin; |
| | Dkk-1; Frizzled related proteins; Gtx-2; Gbx2; FGF-8; |
| | Reelin; Dab1; unc-86 (Pou4fl or Brn3a); Numb; Reln |

[symbol]

indicates data missing or illegible when filed

[0336] Examples of proteins associated with Parkinson's disease include but are not limited to α-synuclein, DJ-1, LRRK2, PINK1, Parkin, UCHL1, Synphilin-1, and NURR1.

[0337] Examples of addiction-related proteins include ABAT (4-aminobutyrate aminotransferase); ACN9 (ACN9 homolog (S. cerevisae)); ADCYAP1 (Adenylate cyclase activating polypeptide 1); ADH1B (Alcohol dehydrogenase IB (class I), beta polypeptide); ADH1C (Alcohol dehydrogenase 1C (class I), gamma polypeptide); ADH4 (Alcohol dehydrogenase 4); ADH7 (Alcohol dehydrogenase 7 (class IV), mu or sigma polypeptide); ADORA1 (Adenosine A1 receptor); ADRA1A (Adrenergic, alpha-1A-, receptor); ALDH2 (Aldehyde dehydrogenase 2 family); ANKK (Ankyrin repeat, TaqI A1 allele); ARC (Activity-regulated cytoskeleton-associated protein); ATF2 (Corticotrophin-releasing factor); AVPR1A (Arginine vasopressin receptor 1A); BDNF (Brain-derived neurotrophic factor); BMAL1 (Aryl hydrocarbon receptor nuclear translocator-like); CDK5 (Cyclin-dependent kinase 5); CHRM2 (Cholinergic receptor, muscarinic 2); CHRNA3 (Cholinergic receptor, nicotinic, alpha 3); CHRNA4 (Cholinergic receptor, nicotinic, alpha 4); CHRNA5 (Cholinergic receptor, nicotinic, alpha 5); CHRNA7 (Cholinergic receptor, nicotinic, alpha 7); CHRNB2 (Cholinergic receptor, nicotinic, beta 2); CLOCK (Clock homolog (mouse)); CNR1 (Cannabinoid receptor 1); CNR2 (Cannabinoid receptor type 2); COMT (Catechol-O-methyltransferase); CREB1 (cAMP Responsive element binding protein 1); CREB2 (Activating transcription factor 2); CRHR1 (Corticotropin releasing hormone receptor 1); CRY1 (Cryptochrome 1); CSNK1E (Casein kinase 1, epsilon); CSPG5 (Chondroitin sulfate proteoglycan 5); CTNNB1 (Catenin (cadherin-associated protein), beta 1, 88 kDa); DBI (Diazepam binding inhibitor); DDN (Dendrin); DRD1 (Dopamine receptor D1); DRD2 (Dopamine receptor D2); DRD3 (Dopamine receptor D3); DRD4 (Dopamine receptor D4); EGR1 (Early growth response 1); ELTD1 (EGF, latrophilin and seven transmembrane domain containing 1); FAAH (Fatty acid amide hydrolase); FOSB (FBJ murine osteosarcoma viral oncogene homolog); FOSB (FBJ murine osteosarcoma viral oncogene homolog B); GABBR2 (Gamma-aminobutyric acid (GABA) B receptor, 2); GABRA2 (Gamma-aminobutyric acid (GABA) A receptor, alpha 2); GABRA4 (Gamma-aminobutyric acid (GABA) A receptor, alpha 4); GABRA6 (Gamma-aminobutyric acid (GABA) A receptor, alpha 6); GABRB3 (Gamma-aminobutyric acid (GABA) A receptor, alpha 3); GABRE (Gamma-aminobutyric acid (GABA) A receptor, epsilon); GABRG1 (Gamma-aminobutyric acid (GABA) A receptor, gamma 1); GAD1 (Glutamate decarboxylase 1); GAD2 (Glutamate decarboxylase 2); GAL (Galanin prepropeptide); GDNF (Glial cell derived neurotrophic factor); GRIA1 (Glutamate receptor, ionotropic, AMPA1); GRIA2 (Glutamate receptor, ionotropic, AMPA2); GRIN1 (Glutamate receptor, ionotropic, N-methyl D-aspartate 1); GRIN2A (Glutamate receptor, ionotropic, N-methyl D-aspartate 2A); GRM2 (Glutamate receptor, metabotropic 2, mGluR2); GRM5 (Metabotropic glutamate receptor 5); GRM6 (Glutamate receptor, metabotropic 6); GRM8 (Glutamate receptor, metabotropic 8); HTR1B (5-Hydroxytryptamine (serotonin) receptor 1B); HTR3A (5-Hydroxytryptamine (serotonin) receptor 3A); IL1 (Interleukin 1); IL15 (Interleukin 15); ILIA (Interleukin 1 alpha); IL1B (Interleukin 1 beta); KCNMA1 (Potassium large conductance calcium-activated channel, subfamily M, alpha member 1); LGALS1 (lectin galactoside-binding soluble 1); MAOA (Monoamine oxidase A); MAOB (Monoamine oxidase B); MAPK1 (Mitogen-activated protein kinase 1); MAPK3 (Mitogen-activated protein kinase 3); MBP (Myelin basic protein); MC2R (Melanocortin receptor type 2); MGLL (Monoglyceride lipase); MOBP (Myelin-associated oligodendrocyte basic protein); NPY (Neuropeptide Y); NR4A1 (Nuclear receptor subfamily 4, group A, member 1); NR4A2 (Nuclear receptor subfamily 4, group A, member 2); NRXN1 (Neurexin 1); NRXN3 (Neurexin 3); NTRK2 (Neurotrophic tyrosine kinase, receptor, type 2); NTRK2 (Tyrosine kinase B neurotrophin receptor); OPRD1 (delta-Opioid receptor); OPRK1 (kappa-Opioid receptor); OPRM1 (mu-Opioid receptor); PDYN (Dynorphin); PENK (Enkephalin); PER2 (Period homolog 2 (Drosophila)); PKNOX2 (PBX/knotted 1 homeobox 2); PLP1 (Proteolipid protein 1); POMC (Proopiomelanocortin); PRKCE (Protein kinase C, epsilon); PROKR2 (Prokineticin receptor 2); RGS9 (Regulator of G-protein signaling 9); RIMS2 (Regulating synaptic membrane exocytosis 2); SCN9A (sodium channel voltage-gated type IX alpha subunit); SLC17A6 (Solute carrier family 17 (sodium-dependent inorganic phosphate cotransporter), member 6); SLC17A7 (Solute carrier family 17 (sodium-dependent inorganic phosphate cotransporter), member 7); SLC1A2 (Solute carrier family 1 (glial high affinity glutamate transporter), member 2); SLC1A3 (Solute carrier family 1 (glial high affinity glutamate transporter), member 3); SLC29A1 (solute carrier family 29 (nucleoside transporters), member 1); SLC4A7 (Solute carrier family 4, sodium bicarbonate cotransporter, member 7); SLC6A3 (Solute carrier family 6 (neurotransmitter transporter, dopamine), member 3); SLC6A4 (Solute carrier family 6 (neurotransmitter transporter, serotonin), member 4); SNCA (Synuclein, alpha (non A4 component of amyloid precursor)); TFAP2B (Transcription factor AP-2 beta); and TRPV1 (Transient receptor potential cation channel, subfamilyV, member 1).

[0338] Examples of inflammation-related proteins include the monocyte chemoattractant protein-1 (MCP1) encoded by the Ccr2 gene, the C-C chemokine receptor type 5 (CCR5) encoded by the Ccr5 gene, the IgG receptor IIB (FCGR2b, also termed CD32) encoded by the Fcgr2b gene, the Fe epsilon R1g (FCER1g) protein encoded by the Fcer1g gene, the forkhead box NI transcription factor (FOXN1) encoded by the FOXN1 gene, Interferon-gamma (IFN-γ) encoded by the IFNg gene, interleukin 4 (IL-4) encoded by the IL-4 gene, perforin-1 encoded by the PRF-1 gene, the cyclooxygenase 1 protein (COX1) encoded by the COX1 gene, the cyclooxygenase 2 protein (COX2) encoded by the COX2 gene, the T-box transcription factor (TBX21) protein encoded by the TBX21 gene, the SH2-B PH domain containing signaling mediator 1 protein (SH2BPSM1) encoded by the SH2B1 gene (also termed SH2BPSM1), the fibroblast growth factor receptor 2 (FGFR2) protein encoded by the FGFR2 gene, the solute carrier family 22 member 1 (SLC22A1) protein encoded by the OCT1 gene (also termed SLC22A1), the peroxisome proliferator-activated receptor alpha protein (PPAR-alpha, also termed the nuclear receptor subfamily 1, group C, member 1; NR1C1) encoded by the PPARA gene, the phosphatase and tensin homolog protein (PTEN) encoded by the PTEN gene, interleukin 1 alpha (IL-1α) encoded by the IL-1A gene, interleukin 1 beta (IL-1β) encoded by the IL-1B gene, interleukin 6 (IL-6) encoded by the IL-6 gene, interleukin 10 (IL-10) encoded by the IL-10 gene, interleukin 12 alpha (IL-12a) encoded by the IL-12A gene, interleukin 12 beta (IL-1203) encoded by the IL-12B gene, interleukin 13 (IL-13) encoded by the IL-13 gene, interleukin 17A (IL-17A, also termed CTLA8) encoded by the IL-17A gene, interleukin 17B (IL-17B) encoded by the IL-17B gene, interleukin 17C (IL-170) encoded by the IL-17C gene interleukin 17D (IL-17D) encoded by the IL-17D gene interleukin 17F (IL-17F) encoded by the IL-17F gene, interleukin 23 (IL-23) encoded by the IL-23 gene, the chemokine (C-X3-C motif) receptor 1 protein (CX3CR1) encoded by the CX3CR1 gene, the chemokine (C-X3-C motif) ligand 1 protein (CX3CL1) encoded by the CX3CL1 gene, the recombination activating gene 1 protein (RAG1) encoded by the RAG1 gene, the recombination activating gene 2 protein (RAG2) encoded by the RAG2 gene, the protein kinase, DNA-activated, catalytic polypeptide 1 (PRKDC) encoded by the PRKDC (DNAPK) gene, the protein tyrosine phosphatase non-receptor type 22 protein (PTPN22) encoded by the PTPN22 gene, tumor necrosis factor alpha (TNFα) encoded by the TNFA gene, the nucleotide-binding oligomerization domain containing 2 protein (NOD2) encoded by the NOD2 gene (also termed CARD15), or the cytotoxic T-lymphocyte antigen 4 protein (CTLA4, also termed CD152) encoded by the CTLA4 gene.

[0339] Examples of cardiovascular diseases associated protein include IL1B (interleukin 1, beta), XDH (xanthine dehydrogenase), TP53 (tumor protein p53), PTGIS (prostaglandin 12 (prostacyclin) synthase), MB (myoglobin), IL4 (interleukin 4), ANGPTI (angiopoietin 1), ABCG8 (ATP-binding cassette, sub-family G (WHITE), member 8), CTSK (cathepsin K), PTGIR (prostaglandin 12 (prostacyclin) receptor (IP)), KCNJ11 (potassium inwardly-rectifying channel, subfamily J, member 11), INS (insulin), CRP (C-reactive protein, pentraxin-related), PDGFRB (platelet-derived growth factor receptor, beta polypeptide), CCNA2 (cyclin A2), PDGFB (platelet-derived growth factor beta polypeptide (simian sarcoma viral (v-sis) oncogene homolog)), KCNJ5 (potassium inwardly-rectifying channel, subfamily J, member 5), KCNN3 (potassium intermediate/small conductance calcium-activated channel, subfamily N, member 3), CAPN10 (calpain 10), PTGES (prostaglandin E synthase), ADRA2B (adrenergic, alpha-2B-, receptor), ABCG5 (ATP-binding cassette, sub-family G (WHITE), member 5), PRDX2 (peroxiredoxin 2), CAPN5 (calpain 5), PARP14 (poly (ADP-ribose) polymerase family, member 14), MEX3C (mex-3 homolog C (C. elegans)), ACE angiotensin I converting enzyme (peptidyl-dipeptidase A) 1), TNF (tumor necrosis factor (TNF superfamily, member 2)), IL6 (interleukin 6 (interferon, beta 2)), STN (statin), SERPINE1 (serpin peptidase inhibitor, clade E (nexin, plasminogen activator inhibitor type 1), member 1), ALB (albumin), ADIPOQ (adiponectin, C1Q and collagen domain containing), APOB (apolipoprotein B (including Ag(x) antigen)), APOE (apolipoprotein E), LEP (leptin), MTHFR (5,10-methylenetetrahydrofolate reductase (NADPH)), APOA1 (apolipoprotein A-I), EDN1 (endothelin 1), NPPB (natriuretic peptide precursor B), NOS3 (nitric oxide synthase 3 (endothelial cell)), PPARG (peroxisome proliferator-activated receptor gamma), PLAT (plasminogen activator, tissue), PTGS2 (prostaglandin-endoperoxide synthase 2 (prostaglandin G/H synthase and cyclooxygenase)), CETP (cholesteryl ester transfer protein, plasma), AGTR1 (angiotensin II receptor, type 1), HMGCR (3-hydroxy-3-methylglutaryl-Coenzyme A reductase). IGF1 (insulin-like growth factor 1 (somatomedin C)), SELE (selectin E), REN (renin), PPARA (peroxisome proliferator-activated receptor alpha), PON1 (paraoxonase 1), KNG1 (kininogen 1), CCL2 (chemokine (C-C motif) ligand 2), LPL (lipoprotein lipase), VWF (von Willebrand factor), F2 (coagulation factor II (thrombin)), ICAM (intercellular adhesion molecule 1), TGFB1 (transforming growth factor, beta 1), NPPA (natriuretic peptide precursor A), IL10 (interleukin 10), EPO (erythropoietin), SOD1 (superoxide dismutase 1, soluble), VCAM1 (vascular cell adhesion molecule 1), IFNG (interferon, gamma), LPA (lipoprotein, Lp(a)), MPO (myeloperoxidase), ESR1 (estrogen receptor 1), MAPK1 (mitogen-activated protein kinase 1), HP (haptoglobin), F3 (coagulation factor III (thromboplastin, tissue factor)), CST3 (cystatin C), COG2 (component of oligomeric golgi complex 2), MMP9 (matrix metallopeptidase 9 (gelatinase B, 92 kDa gelatinase, 92 kDa type N collagenase)), SERPINC1 (serpin peptidase inhibitor, clade C (antithrombin), member 1). F8 (coagulation factor VIII, procoagulant component), HMOX1 (heme oxygenase (decycling) 1), APOC3 (apolipoprotein C-III), IL8 (interleukin 8), PROK1 (prokineticin 1), CBS (cystathionine-beta-synthase), NOS2 (nitric oxide synthase 2, inducible), TLR4 (toll-like receptor 4), SELP (selectin P (granule membrane protein 140 kDa, antigen CD62)). ABCA1 (ATP-binding cassette, sub-family A (ABC1), member 1), AGT (angiotensinogen (serpin peptidase inhibitor, clade A, member 8)), LDLR (low density lipoprotein receptor), GPT (glutamic-pyruvate transaminase (alanine aminotransferase)), VEGFA (vascular endothelial growth factor A), NR3C2 (nuclear receptor subfamily 3, group C, member 2), IL18 (interleukin 18 (interferon-gamma-inducing factor)), NOS1 (nitric oxide synthase 1 (neuronal)). NR3C1 (nuclear receptor subfamily 3, group C, member 1 (glucocorticoid receptor)), FGB (fibrinogen beta chain), HGF (hepatocyte growth factor (hepapoietin A, scatter factor)), ILIA (interleukin 1, alpha), RETN (resistin), AKT1 (v-akt murine thymoma viral oncogene homolog 1), LIPC (lipase, hepatic), HSPD1 (heat shock 60 kDa protein 1 (chaperonin)), MAPK14 (mitogen-activated protein kinase 14). SPP1 (secreted phosphoprotein 1), ITGB3 (integrin, beta 3 (platelet glycoprotein IIIa, antigen CD61)), CAT (catalase), UTS2 (urotensin 2), THBD (thrombomodulin). F10 (coagulation factor X), CP (ceruloplasmin (ferroxidase)), TNFRSF11B (tumor necrosis factor receptor uperfamily, member 11 b), EDNRA (endothelin receptor type A), EGFR (epidermal growth factor receptor (erythroblastic leukemia viral (v-erb-b) oncogene homolog, avian)), MMP2 (matrix metallopeptidase 2 (gelatinase A, 72 kDa gelatinase, 72 kDa type N collagenase)), PLG (plasminogen), NPY (neuropeptide Y), RHOD (ras homolog gene family, member D), MAPK8 (mitogen-activated protein kinase 8), MYC (v-myc myelocytomatosis viral oncogene homolog (avian)), FN1 (fibronectin 1), CMA1 (chymase 1, mast cell), PLAU (plasminogen activator, urokinase), GNB3 (guanine nucleotide binding protein (G protein), beta polypeptide 3), ADRB2 (adrenergic, beta-2-, receptor, surface), APOAS (apolipoprotein A-V), SOD2 (superoxide dismutase 2, mitochondrial), F5 (coagulation factor V (proaccelerin, labile factor)). VDR (vitamin D (1,25-dihydroxyvitamin D3) receptor). ALOXS (arachidonate 5-lipoxygenase), HLA-DRB1 (major histocompatibility complex, class II, DR beta 1), PARP1 (poly (ADP-ribose) polymerase 1), CD40LG (CD40 ligand), PON2 (paraoxonase 2), AGER (advanced glycosylation end product-specific receptor), IRS1 (insulin receptor substrate 1), PTGS1 (prostaglandin-endoperoxide synthase 1 (prostaglandin G/H synthase and cyclooxygenase)), ECE1 (endothelin converting enzyme 1), F7 (coagulation factor VII (serum prothrombin conversion accelerator)), URN (interleukin 1 receptor antagonist), EPHX2 (epoxide hydrolase 2, cytoplasmic), IGFBP1 (insulin-like growth factor binding protein 1), MAPK10 (mitogen-activated protein kinase 10), FAS (Fas (TNF receptor superfamily, member 6)), ABCB1 (ATP-binding cassette, sub-family B (MDRTAP), member 1), JUN (jun oncogene), IGFBP3 (insulin-like growth factor binding protein 3), CD14 (CD14 molecule), PDESA (phosphodiesterase 5A, cGMP-specific), AGTR2 (angiotensin II receptor, type 2), CD40 (CD40 molecule, TNF receptor superfamily member 5), LCAT (lecithin-cholesterol acyltransferase). CCR5 (chemokine (C-C motif) receptor 5), MMP1 (matrix metallopeptidase 1 (interstitial collagenase)), TIMP1 (TIMP metallopeptidase inhibitor 1), ADM (adrenomedullin), DYT10 (dystonia 10), STAT3 (signal transducer and activator of transcription 3 (acute-phase response factor)), MMP3 (matrix metallopeptidase 3 (stromelysin 1, progelatinase)), ELN (elastin), USF1 (upstream transcription factor 1), CFH (complement factor H), HSPA4 (heat shock 70 kDa protein 4), MMP12 (matrix metallopeptidase 12 (macrophage elastase)), MME (membrane metallo-endopeptidase), F2R (coagulation factor II (thrombin) receptor), SELL (selectin L), CTSB (cathepsin B), ANXA5 (annexin A5), ADRB1 (adrenergic, beta-1-, receptor), CYBA (cytochrome b-245, alpha polypeptide), FGA (fibrinogen alpha chain), GGT1 (gamma-glutamyltransferase 1), LIPG (lipase, endothelial), HIF1A (hypoxia inducible factor 1, alpha subunit (basic helix-loop-helix transcription factor)), CXCR4 (chemokine (C-X-C motif) receptor 4), PROC (protein C (inactivator of coagulation factors Va and VIIIa)), SCARB1 (scavenger receptor class B, member 1), CD79A (CD79a molecule, immunoglobulin-associated alpha), PLTP (phospholipid transfer protein), ADD1 (adducin 1 (alpha)), FGG (fibrinogen gamma chain), SAA1 (serum amyloid A1), KCNH2 (potassium voltage-gated channel, subfamily H (eag-related), member 2), DPP4 (dipeptidyl-peptidase 4), G6PD (glucose-6-phosphate dehydrogenase), NPR1 (natriuretic peptide receptor A/guanylate cyclase A (atrionatriuretic peptide receptor A)), VTN (vitronectin), KIAA0101 (KIAA0101), FOS (FBJ murine osteosarcoma viral oncogene homolog), TLR2 (toll-like receptor 2), PPIG (peptidylprolyl isomerase G (cyclophilin G)), URI (interleukin 1 receptor, type I), AR (androgen receptor), CYP1A1 (cytochrome P4SO, family 1, subfamily A, polypeptide 1), SERPINA1 (serpin peptidase inhibitor, clade A (alpha-1 antiproteinase, antitrypsin), member 1), MTR (5-methyltetrahydrofolate-homocysteine methyltransferase), RBP4 (retinol binding protein 4, plasma). APOA4 (apolipoprotein A-IV), CDKN2A (cyclin-dependent kinase inhibitor 2A (melanoma, p16, inhibits CDK4)), FGF2 (fibroblast growth factor 2 (basic)), EDNRB (endothelin receptor type B), ITGA2 (integrin, alpha 2 (CD49B, alpha 2 subunit of VLA-2 receptor)), CABIN1 (calcineurin binding protein 1), SHBG (sex hormone-binding globulin), HMGB1 (high-mobility group box 1), HSP90B2P (heat shock protein 90 kDa beta (Grp94), member 2 (pseudogene)), CYP3A4 (cytochrome P450, family 3, subfamily A, polypeptide 4), GJA1 (gap junction protein, alpha 1, 43 kDa), CAV1 (caveolin 1, caveolae protein, 22 kDa), ESR2 (estrogen receptor 2 (ER beta)), LTA (lymphotoxin alpha (TNF superfamily, member 1)), GDF15 (growth differentiation factor 15), BDNF (brain-derived neurotrophic factor), CYP2D6 (cytochrome P450, family 2, subfamily D, polypeptide 6), NGF (nerve growth factor (beta polypeptide)), SP1 (Sp transcription factor), TGIF1 (TGFB-induced factor homeobox 1), SRC (v-src sarcoma (Schmidt-Ruppin A-2) viral oncogene homolog (avian)). EGF (epidermal growth factor (beta-urogastrone)), PIK3CG (phosphoinositide-3-kinase, catalytic, gamma polypeptide), HLA-A (major histocompatibility complex, class I, A), KCNQ1 (potassium voltage-gated channel, KQT-like subfamily, member 1), CNR1 (cannabinoid receptor 1 (brain)), FBN1 (fibrillin 1), CHKA (choline kinase alpha), BEST1 (bestrophin 1), APP (amyloid beta (A4) precursor protein), CTNNB1 (catenin (cadherin-associated protein), beta 1, 88 kDa), IL2 (interleukin 2), CD36 (CD36 molecule (thrombospondin receptor)), PRKAB1 (protein kinase, AMP-activated, beta 1 non-catalytic subunit), TPO (thyroid peroxidase). ALDH7A1 (aldehyde dehydrogenase 7 family, member A1), CX3CR1 (chemokine (C-X3-C motif) receptor 1), TH (tyrosine hydroxylase), F9 (coagulation factor IX), GH1 (growth hormone 1), TF (transferrin), HFE (hemochromatosis), IL17A (interleukin 17A), PTEN (phosphatase and tensin homolog), GSTM1 (glutathione S-transferase mu 1), DMD (dystrophin), GATA4 (GATA binding protein 4), F13A1 (coagulation factor XIII, A1 polypeptide), TTR (transthyretin), FABP4 (fatty acid binding protein 4, adipocyte), PON3 (paraoxonase 3). APOC (apolipoprotein C-1), INSR (insulin receptor), TNFRSF1B (tumor necrosis factor receptor superfamily, member 1B), HTR2A (5-hydroxytryptamine (serotonin) receptor 2A), CSF3 (colony stimulating factor 3 (granulocyte)), CYP2C9 (cytochrome P450, family 2, subfamily C, polypeptide 9), TXN (thioredoxin), CYP11B2 (cytochrome P450, family 11, subfamily B, polypeptide 2), PTH (parathyroid hormone). CSF2 (colony stimulating factor 2 (granulocyte-macrophage)), KDR (kinase insert domain receptor (a type III receptor tyrosine kinase)), PLA2G2A (phospholipase A2, group IIA (platelets, synovial fluid)), B2M (beta-2-microglobulin), THBS1 (thrombospondin 1), GCG (glucagon), RHOA (ras homolog gene family, member A), ALDH2 (aldehyde dehydrogenase 2 family (mitochondrial)), TCF7L2 (transcription factor 7-like 2 (T-cell specific, HMG-box)), BDKRB2 (bradykinin receptor B2), NFE2L2 (nuclear factor (erythroid-derived 2)-like 2), NOTCH1 (Notch homolog 1, translocation-associated (Drosophila)), UGT1A1 (UDP glucuronosyltransferase 1 family, polypeptide A1), IFNA1 (interferon, alpha 1), PPARD (peroxisome proliferator-activated receptor delta), SIRT1 (sirtuin (silent mating type information regulation 2 homolog) 1 (S. cerevisiae)), GNRH1 (gonadotropin-releasing hormone 1 (luteinizing-releasing hormone)), PAPPA (pregnancy-associated plasma protein A, pappalysin 1), ARR3 (arrestin 3, retinal (X-arrestin)), NPPC (natriuretic peptide precursor C), AHSP (alpha hemoglobin stabilizing protein), PTK2 (PTK2 protein tyrosine kinase 2), IL13 (interleukin 13), MTOR (mechanistic target of rapamycin (serine/threonine kinase)), ITGB2 (integrin, beta 2 (complement component 3 receptor 3 and 4 subunit)), GSTT1 (glutathione S-transferase theta 1), IL6ST (interleukin 6 signal transducer (gp130, oncostatin M receptor)), CPB2 (carboxypeptidase B2 (plasma)), CYP1A2 (cytochrome P450, family 1, subfamily A, polypeptide 2), HNF4A (hepatocyte nuclear factor 4, alpha), SLC6A4 (solute carrier family 6 (neurotransmitter transporter, serotonin), member 4), PLA2G6 (phospholipase A2, group VI (cytosolic, calcium-independent)), TNFSF11 (tumor necrosis factor (ligand) superfamily, member 11), SLC8A1 (solute carrier family 8 (sodium/calciwn exchanger), member 1), F2RL1 (coagulation factor II (thrombin) receptor-like 1), AKR1A1 (aldo-keto reductase family 1, member A1 (aldehyde reductase)), ALDH9A1 (aldehyde dehydrogenase 9 family, member A1), BGLAP (bone gamma-carboxyglutamate (gla) protein), MTTP (microsomal triglyceride transfer protein), MTRR (5-methyltetrahydrofolate-homocysteine methyltransferase reductase), SULT1A3 (sulfotransferase family, cytosolic, 1A, phenol-preferring, member 3), RAGE (renal tumor antigen), C4B (complement component 4B (Chido blood group), P2RY12 (purinergic receptor P2Y, G-protein coupled, 12), RNLS (renalase, FAD-dependent amine oxidase), CREB1 (cAMP responsive element binding protein 1), POMC (proopiomelanocortin), RAC1 (ras-related C3 botulinum toxin substrate 1 (rho family, small GTP binding protein Rac1)), LMNA (lamin NC), CD59 (CD59 molecule, complement regulatory protein), SCN5A (sodium channel, voltage-gated, type V, alpha subunit), CYP1B1 (cytochrome P450, family 1, subfamily B, polypeptide 1), MIF (macrophage migration inhibitory factor (glycosylation-inhibiting factor)), MMP13 (matrix metallopeptidase 13 (collagenase 3)), TIMP2 (TIMP metallopeptidase inhibitor 2). CYP19A1 (cytochrome P450, family 19, subfamily A, polypeptide 1), CYP21A2 (cytochrome P450, family 21, subfamily A, polypeptide 2), PTPN22 (protein tyrosine phosphatase, non-receptor type 22 (lymphoid)), MYH14 (myosin, heavy chain 14, non-muscle), MBL2 (mannose-binding lectin (protein C) 2, soluble (opsonic defect)), SELPLG (selectin P ligand), AOC3 (amine oxidase, copper containing 3 (vascular adhesion protein 1)), CTSL1 (cathepsin L1), PCNA (proliferating cell nuclear antigen), IGF2 (insulin-like growth factor 2 (somatomedin A)), ITGB1 (integrin, beta 1 (fibronectin receptor, beta polypeptide, antigen CD29 includes MDF2, MSK12)), CAST (calpastatin), CXCL12 (chemokine (C-X-C motif) ligand 12 (stromal cell-derived factor 1)), IGHE (immunoglobulin heavy constant epsilon), KCNE1 (potassium voltage-gated channel, Isk-related family, member 1), TFRC (transferrin receptor (p90, CD71)), COL1A1 (collagen, type I, alpha 1), COL1A2 (collagen, type I, alpha 2), IL2RB (interleukin 2 receptor, beta), PLA2G10 (phospholipase A2, group X), ANGPT2 (angiopoietin 2), PROCR (protein C receptor, endothelial (EPCR)), NOX4 (NADPH oxidase 4), HAMP (hepcidin antimicrobial peptide), PTPN11 (protein tyrosine phosphatase, non-receptor type 11). SLC2A1 (solute carrier family 2 (facilitated glucose transporter), member 1), IL2RA (interleukin 2 receptor, alpha), CCL5 (chemokine (C-C motif) ligand 5), IRF1 (interferon regulatory factor 1), CFLAR (CASP8 and FADD-like apoptosis regulator), CALCA (calcitonin-related polypeptide alpha), EIF4E (eukaryotic translation initiation factor 4E), GSTP1 (glutathione S-transferase pi 1), JAK2 (Janus kinase 2), CYP3A5 (cytochrome P450, family 3, subfamily A, polypeptide 5), HSPG2 (heparan sulfate proteoglycan 2), CCL3 (chemokine (C-C motif) ligand 3), MYD88 (myeloid differentiation primary response gene (88)), VIP (vasoactive intestinal peptide), SOAT1 (sterol O-acyltransferase 1), ADRBK1 (adrenergic, beta, receptor kinase 1), NR4A2 (nuclear receptor subfamily 4, group A, member 2), MMP8 (matrix metallopeptidase 8 (neutrophil collagenase)), NPR2 (natriuretic peptide receptor B/guanylate cyclase B (atrionatriuretic peptide receptor B)), GCH1 (GTP cyclohydrolase 1), EPRS (glutamyl-prolyl-tRNA synthetase), PPARGCIA (peroxisome proliferator-activated receptor gamma, coactivator 1 alpha), F12 (coagulation factor XII (Hageman factor)), PECAM1 (plateletlendothelial cell adhesion molecule), CCL4 (chemokine (C-C motif) ligand 4), SERPINA3 (serpin peptidase inhibitor, clade A (alpha-1 antiproteinase, antitrypsin), member 3), CASR (calcium-sensing receptor), GJA5 (gap junction protein, alpha 5, 40 kDa), FABP2 (fatty acid binding protein 2, intestinal), TTF2 (transcription termination factor, RNA polymerase 11), PRO51 (protein S (alpha)), CTF1 (cardiotrophin 1), SGCB (sarcoglycan, beta (43 kDa dystrophin-associated glycoprotein)), YME1L1 (YME1-like 1 (S. cerevisiae)), CAMP (cathelicidin antimicrobial peptide), ZC3H12A (zinc finger CCCH-type containing 12A), AKR1B1 (aldo-keto reductase family 1, member B1 (aldose reductase)), DES (desmin), MMP7 (matrix metallopeptidase 7 (matrilysin, uterine)), AHR (aryl hydrocarbon receptor), CSF1 (colony stimulating factor 1 (macrophage)), HDAC9 (histone deacetylase 9), CTGF (connective tissue growth factor), KCNMA1 (potassium large conductance calcium-activated channel, subfamily M, alpha member 1), UGT1A (UDP glucuronosyltransferase 1 family, polypeptide A complex locus), PRKCA (protein kinase C, alpha), COMT (catechol-O-methyltransferase), S100B (S100B calcium binding protein B), EGR1 (early growth response 1), PRL (prolactin), IL15 (interleukin 15), DRD4 (dopamine receptor D4), CAMK2G (calcium/calmodulin-dependent protein kinase II gamma), SLC22A2 (solute carrier family 22 (organic cation transporter), member 2), CCL11 (chemokine (C-C motif) ligand 11), PGF (8321 placental growth factor), THPO (thrombopoietin), GP6 (glycoprotein VI (platelet)), TACR1 (tachykinin receptor 1), NTS (neurotensin), HNF1A (HNF1 homeobox A), SST (somatostatin), KCND1 (potassium voltage-gated channel, Shal-related subfamily, member 1), LOC646627 (phospholipase inhibitor). TBXAS1 (thromboxane A synthase 1 (platelet)), CYP2J2 (cytochrome P450, family 2, subfamily J, polypeptide 2), TBXA2R (thromboxane A2 receptor), ADH1C (alcohol dehydrogenase 1C (class I), gamma polypeptide), ALOX12 (arachidonate 12-lipoxygenase), AHSG (alpha-2-HS-glycoprotein), BHMT (betaine-homocysteine methyltransferase), GJA4 (gap junction protein, alpha 4, 37 kDa), SLC25A4 (solute carrier family 25 (mitochondrial carrier; adenine nucleotide translocator), member 4), ACLY (ATP citrate lyase), ALOX5AP (arachidonate 5-lipoxygenase-activating protein), NUMA (nuclear mitotic apparatus protein 1), CYP27B1 (cytochrome P450, family 27, subfamily B, polypeptide 1), CYSLTR2 (cysteinylleukotriene receptor 2), SOD3 (superoxide dismutase 3, extracellular), LTC4S (leukotriene C4 synthase), UCN (urocortin), GHRL (ghrelin/obestatin prepropeptide), APOC2 (apolipoprotein C-II), CLEC4A (C-type lectin domain family 4, member A), KBTBD10 (kelch repeat and BTB (POZ) domain containing 10), TNC (tenascin C), TYMS (thymidylate synthetase), SHC1 (SHC (Src homology 2 domain containing) transforming protein 1), LRP1 (low density lipoprotein receptor-related protein 1), SOCS3 (suppressor of cytokine signaling 3), ADH1B (alcohol dehydrogenase 1B (class 1), beta polypeptide), KLK3 (kallikrein-related peptidase 3), HSD11B1 (hydroxysteroid (11-beta) dehydrogenase 1), VKORC (vitamin K epoxide reductase complex, subunit 1), SERPINB2 (serpin peptidase inhibitor, clade B (ovalbumin), member 2), TNS1 (tensin 1), RNF19A (ring finger protein 19A), EPOR (erythropoietin receptor), ITGAM (integrin, alpha M (complement component 3 receptor 3 subunit)), PITX2 (paired-like homeodomain 2), MAPK7 (mitogen-activated protein kinase 7), FCGR3A (Fc fragment of IgG, low affinity IIIa, receptor (CD16a)), LEPR (leptin receptor), ENG (endoglin), GPX1 (glutathione peroxidase 1), GOT2 (glutamic-oxaloacetic transaminase 2, mitochondrial (aspmiate aminotransferase 2)), HRH1 (histamine receptor H1), NR1I2 (nuclear receptor subfamily 1, group I, member 2), CRH (corticotropin releasing hormone), HTR1A (5-hydroxytryptamine (serotonin) receptor 1A), VDAC1 (voltage-dependent anion channel 1), HPSE (heparanase), SFTPD (surfactant protein D), TAP2 (transporter 2, ATP-binding cassette, sub-family B (MDR/TAP)), RNF123 (ring finger protein 123), PTK2B (PTK2B protein tyrosine kinase 2 beta), NTRK2 (neurotrophic tyrosine kinase, receptor, type 2), IL6R (interleukin 6 receptor), ACHE (acetylcholinesterase (Yt blood group)), GLP1R (glucagon-like peptide 1 receptor), GHR (growth hormone receptor), GSR (glutathione reductase), NQO1 (NAD(P)H dehydrogenase, quinone 1), NR5A1 (nuclear receptor subfamily 5, group A, member 1), GJB2 (gap junction protein, beta 2, 26 kDa), SLC9A1 (solute carrier family 9 (sodium/hydrogen exchanger), member 1), MAOA (monoamine oxidase A), PCSK9 (proprotein convertase subtilisin/kexin type 9), FCGR2A (Fc fragment of IgG, low affinity IIa, receptor (CD32)), SERPINF1 (serpin peptidase inhibitor, clade F (alpha-2 antiplasmin, pigment epithelium derived factor), member 1), EDN3 (endothelin 3), DHFR (dihydrofolate reductase), GAS6 (growth arrest-specific 6), SMPD1 (sphingomyelin phosphodiesterase 1, acid lysosomal), UCP2 (uncoupling protein 2 (mitochondrial, proton carrier)), TFAP2A (transcription factor AP-2 alpha (activating enhancer binding protein 2 alpha)), C4BPA (complement component 4 binding protein, alpha), SERPINF2 (serpin peptidase inhibitor, clade F (alpha-2 antiplasmin, pigment epithelium derived factor), member 2), TYMP (thymidine phosphorylase), ALPP (alkaline phosphatase, placental (Regan isozyme)), CXCR2 (chemokine (C-X-C motif) receptor 2), SLC39A3 (solute carrier family 39 (zinc transporter), member 3), ABCG2 (ATP-binding cassette, sub-family G (WHITE), member 2), ADA (adenosine deaminase), JAK3 (Janus kinase 3), HSPA1A (heat shock 70 kDa protein 1A), FASN (fatty acid synthase), FGF1 (fibroblast growth factor 1 (acidic)), F11 (coagulation factor X1), ATP7A (ATPase, Cu++ transporting, alpha polypeptide), CR1 (complement component (3bi4b) receptor 1 (Knops blood group)), GFAP (glial fibrillary acidic protein), ROCK1 (Rho-associated, coiled-coil containing protein kinase 1), MECP2 (methyl CpG binding protein 2 (Rett syndrome)), MYLK (myosin light chain kinase), BCHE (butyrylcholinesterase), LIPE (lipase, hormone-sensitive), PRDX5 (peroxiredoxin 5), ADORA1 (adenosine A1 receptor), WRN (Werner syndrome, RecQ helicase-like), CXCR3 (chemokine (C-X-C motif) receptor 3), CD81 (CD81 molecule), SMAD7 (SMAD family member 7), LAMC2 (laminin, gamma 2), MAP3K5 (mitogen-activated protein kinase kinase kinase 5), CHGA (chromogranin A (parathyroid secretory protein 1)), IAPP (islet amyloid polypeptide), RHO (rhodopsin), ENPP1 (ectonucleotide pyrophosphatase/phosphodiesterase 1), PTHLH (parathyroid hormone-like hormone), NRG1 (neuregulin 1), VEGFC (vascular endothelial growth factor C), ENPEP (glutamyl aminopeptidase (aminopeptidase A)), CEBPB (CCAAT/enhancer binding protein (C/EBP), beta), NAGLU (N-acetylglucosaminidase, alpha-), F2RL3 (coagulation factor II (thrombin) receptor-like 3), CX3CL1 (chemokine (C-X3-C motif) ligand 1), BDKRB1 (bradykinin receptor B1), ADAMTS13 (ADAM metallopeptidase with thrombospondin type 1 motif, 13), ELANE (elastase, neutrophil expressed), ENPP2 (ectonucleotide pyrophosphatase/phosphodiesterase 2), CISH (cytokine inducible SH2-containing protein), GAST (gastrin), MYOC (myocilin, trabecular meshwork inducible glucocmticoid response), ATP1A2 (ATPase, Na+/K+ transporting, alpha 2 polypeptide), NF1 (neurofibromin 1), GJB1 (gap junction protein, beta 1, 32 kDa), MEF2A (myocyte enhancer factor 2A), VCL (vinculin), BMPR2 (bone morphogenetic protein receptor, type II (serine/threonine kinase)), TUBB (tubulin, beta), CDC42 (cell division cycle 42 (GTP binding protein, 25 kDa)), KRT18 (keratin 18), HSF1 (heat shock transcription factor 1), MYB (v-myb myeloblastosis viral oncogene homolog (avian)), PRKAA2 (protein kinase, AMP-activated, alpha 2 catalytic subunit), ROCK2 (Rho-associated, coiled-coil containing protein kinase 2), TFPI (tissue factor pathway inhibitor (lipoprotein-associated coagulation inhibitor)), PRKG1 (protein kinase, cGMP-dependent, type 1), BMP2 (bone morphogenetic protein 2), CTNND1 (catenin (cadherin-associated protein), delta 1), CTH (cystathionase (cystathionine gamma-lyase)), CTSS (cathepsin S), VAV2 (vav 2 guanine nucleotide exchange factor), NPY2R (neuropeptide Y receptor Y2), IGFBP2 (insulin-like growth factor binding protein 2, 36 kDa), CD28 (CD28 molecule), GSTA1 (glutathione S-transferase alpha 1), PPIA (peptidylprolyl isomerase A (cyclophilin A)), APOH (apolipoprotein H (beta-2-glycoprotein I)), S100A8 (S100 calcium binding protein A8), IL1 (interleukin 11), ALOX15 (arachidonate 15-lipoxygenase), FBLN (fibulin 1), NR1H3 (nuclear receptor subfamily 1, group H, member 3), SCD (stearoyl-CoA desaturase (delta-9-desaturase)), GIP (gastric inhibitory polypeptide), CHGB (chromogranin B (secretogranin 1)), PRKCB (protein kinase C, beta), SRD5A1 (steroid-5-alpha-reductase, alpha polypeptide 1 (3-oxo-5 alpha-steroid delta 4-dehydrogenase alpha 1)), HSD11B2 (hydroxysteroid (11-beta) dehydrogenase 2), CALCRL (calcitonin receptor-like), GALNT2 (UDP-N-acetyl-alpha-D-galactosamine:polypeptide N-acetylgalactosaminyltransferase 2 (GalNAc-T2)), ANGPTLA (angiopoietin-like 4), KCNN4 (potassium intermediate/small conductance calcium-activated channel, subfamily N, member 4), PIK3C2A (phosphoinositide-3-kinase, class 2, alpha polypeptide), HBEGF (heparin-binding EGF-like growth factor), CYP7A1 (cytochrome P450, family 7, subfamily A, polypeptide 1), HLA-DRB5 (major histocompatibility complex, class II, DR beta 5), BNIP3 (BCL2/adenovirus E1B 19 kDa interacting protein 3), GCKR (glucokinase (hexokinase 4) regulator), S100A12 (S100 calcium binding protein A12), PAD14 (peptidyl arginine deiminase, type IV), HSPA14 (heat shock 70 kDa protein 14), CXCR1 (chemokine (C-X-C motif) receptor 1), H19 (H19, imprinted maternally expressed transcript (non-protein coding)), KRTAP19-3 (keratin associated protein 19-3), IDDM2 (insulin-dependent diabetes mellitus 2), RAC2 (ras-related C3 botulinum toxin substrate 2 (rho family, small GTP binding protein Rac2)), RYR1 (ryanodine receptor 1 (skeletal)), CLOCK (clock homolog (mouse)), NGFR (nerve growth factor receptor (TNFR superfamily, member 16)), DBH (dopamine beta-hydroxylase (dopamine beta-monooxygenase)). CHRNA4 (cholinergic receptor, nicotinic, alpha 4), CACNA1C (calcium channel, voltage-dependent, L type, alpha 1C subunit), PRKAG2 (protein kinase, AMP-activated, gamma 2 non-catalytic subunit), CHAT (choline acetyltransferase), PTGDS (prostaglandin D2 synthase 21 kDa (brain)), NR1H2 (nuclear receptor subfamily 1, group H, member 2), TEK (TEK tyrosine kinase, endothelial), VEGFB (vascular endothelial growth factor B), MEF2C (myocyte enhancer factor 2C), MAPKAPK2 (mitogen-activated protein kinase-activated protein kinase 2), TNFRSF11A (tumor necrosis factor receptor superfamily, member 11a, NFKB activator), HSPA9 (heat shock 70 kDa protein 9 (mortalin)), CYSLTR1 (cysteinyl leukotriene receptor 1), MAT1A (methionine adenosyltransferase 1, alpha), OPRL1 (opiate receptor-like 1), IMPA1 (inositol(myo)-1(or 4)-monophosphatase 1), CLCN2 (chloride channel 2), DLD (dihydrolipoamide dehydrogenase), PSMA6 (proteasome (prosome, macropain) subunit, alpha type, 6), PSMB8 (proteasome (prosome, macropain) subunit, beta type, 8 (large multifunctional peptidase 7)), CHI3L1 (chitinase 3-like 1 (cartilage glycoprotein-39)), ALDH1B1 (aldehyde dehydrogenase 1 family, member B1), PARP2 (poly (ADP-ribose) polymerase 2), STAR (steroidogenic acute regulatory protein), LBP (lipopolysaccharide binding protein), ABCC6 (ATP-binding cassette, sub-family C(CFTR/MRP), member 6), RGS2 (regulator of G-protein signaling 2, 24 kDa), EFNB2 (ephrin-B2), GJB6 (gap junction protein, beta 6, 30 kDa), APOA2 (apolipoprotein A-II), AMPD1 (adenosine monophosphate deaminase 1), DYSF (dysferlin, limb girdle muscular dystrophy 2B (autosomal recessive)), FDFT1 (famesyl-diphosphate famesyltransferase 1), EDN2 (endothelin 2), C(CR6 (chemokine (C-C motif) receptor 6), GJB3 (gap junction protein, beta 3, 31 kDa), IL1RL1 (interleukin 1 receptor-like 1), ENTPD1 (ectonucleoside triphosphate diphosphohydrolase 1), BBS4 (Bardet-Biedl syndrome 4), CELSR2 (cadherin, EGF LAG seven-pass G-type receptor 2 (flamingo homolog, Drosophila)), F11R (F11 receptor), RAPGEF3 (Rap guanine nucleotide exchange factor (GEF) 3), HYAL1 (hyaluronoglucosaminidase 1), ZNF259 (zinc finger protein 259), ATOX1 (ATX1 antioxidant protein 1 homolog (yeast)), ATF6 (activating transcription factor 6), KHK (ketohexokinase (fructokinase)), SAT1 (spermidine/spermine N1-acetyltransferase 1), GGH (gamma-glutamyl hydrolase (conjugase, folylpolygammaglutamyl hydrolase)), TIMP4 (TIMP metallopeptidase inhibitor 4), SLC4A4 (solute carrier family 4, sodium bicarbonate cotransporter, member 4), PDE2A (phosphodiesterase 2A, cGMP-stimulated), PDE3B (phosphodiesterase 3B, cGMP-inhibited), FADS1 (fatty acid desaturase 1), FADS2 (fatty acid desaturase 2), TMSB4X (thymosin beta 4, X-linked), TXNIP (thioredoxin interacting protein), LIMS1 (LIM and senescent cell antigen-like domains 1), RHOB (ras homolog gene family, member B), LY96 (lymphocyte antigen 96), FOXO1 (forkhead box 01), PNPLA2 (patatin-like phospholipase domain containing 2), TRH (thyrotropin-releasing hormone), GJC1 (gap junction protein, gamma 1, 45 kDa), SLC17AS (solute carrier family 17 (anionlsugar transporter), member 5), FTO (fat mass and obesity associated), GJD2 (gap junction protein, delta 2, 36 kDa), PSRC1 (proline/serine-rich coiled-coil 1), CASP12 (caspase 12 (gene/pseudogene)), GPBAR1 (G protein-coupled bile acid receptor 1), PXK (PX domain containing serine/threonine kinase), IL33 (interleukin 33), TRIB1 (tribbles homolog 1 (Drosophila)), PBX4 (pre-B-cellleukemia homeobox 4), NUPR1 (nuclear protein, transcriptional regulator, 1), 15-Sep (15 kDa selenoprotein), CILP2 (cartilage intermediate layer protein 2), TERC (telomerase RNA component), GGT2 (gamma-glutamyltransferase 2), MT-001 (mitochondrially encoded cytochrome c oxidase I), and UOX (urate oxidase, pseudogene).

[0340] Examples of Alzheimer's disease associated proteins include the very low density lipoprotein receptor protein (VLDLR) encoded by the VLDLR gene, the ubiquitin-like modifier activating enzyme 1 (UBA1) encoded by the UBA1 gene, the NEDD8-activating enzyme E1 catalytic subunit protein (UBE1C) encoded by the UBA3 gene, the aquaporin 1 protein (AQP1) encoded by the AQP1 gene, the ubiquitin carboxyl-terminal esterase L1 protein (UCHL1) encoded by the UCHL1 gene, the ubiquitin carboxyl-terminal hydrolase isozyme L3 protein (UCHL3) encoded by the UCHL3 gene, the ubiquitin B protein (UBB) encoded by the UBB gene, the microtubule-associated protein tau (MAPT) encoded by the MAPT gene, the protein tyrosine phosphatase receptor type A protein (PTPRA) encoded by the PTPRA gene, the phosphatidylinositol binding clathrin assembly protein (PICALM) encoded by the PICALM gene, the clusterin protein (also known as apoplipoprotein J) encoded by the CLU gene, the presenilin 1 protein encoded by the PSEN1 gene, the presenilin 2 protein encoded by the PSEN2 gene, the sortilin-related receptor L (DLR class) A repeats-containing protein (SORL) protein encoded by the SORL1 gene, the amyloid precursor protein (APP) encoded by the APP gene, the Apolipoprotein E precursor (APOE) encoded by the APOE gene, or the brain-derived neurotrophic factor (BDNF) encoded by the BDNF gene, or combinations thereof.

[0341] Examples of proteins associated Autism Spectrum Disorder include the benzodiazapine receptor (peripheral) associated protein 1 (BZRAP1) encoded by the BZRAP1 gene, the AF4/FMR2 family member 2 protein (AFF2) encoded by the AFF2 gene (also termed MFR2), the fragile X mental retardation autosomal homolog 1 protein (FXR1) encoded by the FXR1 gene, the fragile X mental retardation autosomal homolog 2 protein (FXR2) encoded by the FXR2 gene, the MAM domain containing glycosylphosphatidylinositol anchor 2 protein (MDGA2) encoded by the MDGA2 gene, the methyl CpG binding protein 2 (MECP2) encoded by the MECP2 gene, the metabotropic glutamate receptor 5 (MGLUR5) encoded by the MGLUR5-1 gene (also termed GRM5), the neurexin 1 protein encoded by the NRXN1 gene, or the semaphorin-5A protein (SEMA5A) encoded by the SEMA5A gene.

[0342] Examples of proteins associated Macular Degeneration include the ATP-binding cassette, sub-family A (ABC1) member 4 protein (ABCA4) encoded by the ABCR gene, the apolipoprotein E protein (APOE) encoded by the APOE gene, the chemokine (C-C motif) Ligand 2 protein (CCL2) encoded by the CCL2 gene, the chemokine (C-C motif) receptor 2 protein (CCR2) encoded by the CCR2 gene, the ceruloplasmin protein (CP) encoded by the CP gene, the cathepsin D protein (CTSD) encoded by the CTSD gene, or the metalloproteinase inhibitor 3 protein (TIMP3) encoded by the TIMP3 gene.

[0343] Examples of proteins associated Schizophrenia include NRG1, ErbB4, CPLX1, TPH1, TPH2, NRXN1, GSK3A, BDNF, DISC1, GSK3B, and combinations thereof.

[0344] Examples of proteins involved in tumor suppression include ATM (ataxia telangiectasia mutated), ATR (ataxia telangiectasia and Rad3 related), EGFR (epidermal growth factor receptor), ERBB2 (v-erb-b2 erythroblastic leukemia viral oncogene homolog 2), ERBB3 (v-erb-b2 erythroblastic leukemia viral oncogene homolog 3), ERBB4 (v-erb-b2 erythroblastic leukemia viral oncogene homolog 4), Notch 1, Notch2, Notch 3, Notch 4, ATK1 (v-alet murine thymoma viral oncogene homolog 1). ATK2 (v-alet murine thymoma viral oncogene homolog 2), ATK3 (v-akt murine thymoma viral oncogene homolog 3), HIF1a (hypoxia-inducible factor 1a), HIF3a (hypoxia-inducible factor 1a), Met (met pronto-oncogene), HRG (histidine-rich glycoprotein), Bc12, PPAR(alpha) (peroxisome proliferator-activated receptor alpha), Ppar(gamma) (peroxisome proliferator-activated receptor gamma), WT1 (Wilmus Tumor 1), FGF1R(fibroblast growth factor 1 receptor), FGF2R (fibroblast growth factor 1 receptor), FGF3R (fibroblast growth factor 3 receptor), FGF4R (fibroblast growth factor 4 receptor), FGF5R (fibroblast growth factor 5 receptor), CDKN2a (cyclin-dependent kinase inhibitor 2A), APC (adenomatous polyposis coli), Rb1 (retinoblastoma 1), MEN1 (multiple endocrine neoplasia)), VHL (von-Hippel-Lindau tumor suppressor), BRCA1 (breast cancer 1), BRCA2 (breast cancer 2), AR (androgen receptor), TSG101 (tumor susceptibility gene 101), Igf1 (insulin-like growth factor 1), Igf2 (insulin-like growth factor 2). Igf 1R (insulin-like growth factor 1 receptor), Igf2R (insulin-like growth factor 2 receptor) Bax (BCL-2 associated X protein), CASP1 (Caspase 1), CASP2 (Caspase 2), CASP3 (Caspase 3), CASP4(Caspase 4), CASP6 (Caspase 6), CASP7(Caspase 7), CASP8 (Caspase 8), CASP9 (Caspase 9), CASP12 (Caspase 12), Kras (v-Ki-ras2 Kirsten rate sarcoma viral oncogene homolog), PTEN (phosphate and tensin homolog), BCRP (breast cancer receptor protein), p53, TNF (tumor necrosis factor (TNF superfamily, member 2)), TP53 (tumor protein p⁵³), ERBB2 (v-erb-b2 erythroblastic leukemia viral oncogene homolog 2, neuro/glioblastoma derived oncogene homolog (avian)), FN1 (fibronectin 1), TSC1 (tuberous sclerosis 1), PTGS2 (prostaglandin-endoperoxide synthase 2 (prostaglandin G/H synthase and cyclooxygenase)), PTEN (phosphatase and tensin homolog), PCNA (proliferating cell nuclear antigen), COL18A1 (collagen, type XVIII, alpha 1), TSSC4 (tumor suppressing subtransferable candidate 4), JUN (jun oncogene), MAPK8 (mitogen-activated protein kinase 8), TGFB1 (transforming growth factor, beta 1), IL6 (interleukin 6 (interferon, beta 2)), IFNG (interferon, gamma), BRCA1 (breast cancer 1, early onset), TSPAN32 (tetraspanin 32), BCL2 (B-cell CLL/lymphoma 2), NF2 (neurofibromin 2 (merlin)), GJB1 (gap junction protein, beta 1, 32 kDa), MAPK1 (mitogen-activated protein kinase 1), CD44 (CD44 molecule (Indian blood group)), PGR (progesterone receptor), TNS1 (tensin 1), PROK (prokineticin 1), SIAH1 (seven in absentia homolog 1 (Drosophila)), ENG (endoglin), TP73 (tumor protein p73), APC (adenomatous polyposis coli), BAX (BCL2-associated X protein), SRC (v-src sarcoma (Schmidt-Ruppin A-2) viral oncogene homolog (avian)), VHL (von Rippel-Lindau tumor suppressor), FHIT (fragile histidine triad gene), NFKB1 (nuclear factor of kappa light polypeptide gene enhancer in B-cells 1), IFNα1 (interferon, alpha 1), TGFBR1 (transforming growth factor, beta receptor 1), PRKCD (protein kinase C, delta), TGIF1 (TGFB-induced factor homeobox 1), DLC1 (deleted in liver cancer 1), SLC22A18 (solute carrier family 22, member 18), VEGFA (vascular endothelial growth factor A), MME (membrane metallo-endopeptidase), IL3 (interleukin 3 (colony-stimulating factor, multiple)), MK167 (antigen identified by monoclonal antibody Ki-67), HSPD1 (heat shock 60 kDa protein 1 (chaperonin)), HSPB1 (heat shock 27 kDa protein 1). HSP90B2P (heat shock protein 90 kDa beta (Grp94), member 2 (pseudogene)), MBL2 (mannose-binding lectin (protein C) 2, soluble (opsonic defect)), ZFYVE9 (zinc finger, FYVE domain containing 9), TERT (telomerase reverse transcriptase), PML (promyelocytic leukemia), SKP2 (S-phase kinase-associated protein 2 (p45)), CYCS (cytochrome c, somatic), MAPK10 (mitogen-activated protein kinase 10), PAX7 (paired box 7), YAP1 (Yes-associated protein 1), PARP1 (poly (ADP-ribose) polymerase 1), MIR34A (microRNA 34a), PRKCA (protein kinase C, alpha), FAS (Fas (TNF receptor superfamily, member 6)), SYK (spleen tyrosine kinase), GSK3B (glycogen synthase kinase 3 beta), PRKCE (protein kinase C, epsilon), CYP9A1 (cytochrome P450, family 19, subfamily A, polypeptide 1), ABCB1 (ATP-binding cassette, sub-family B (MDR/TAP), member 1), NFKB1A (nuclear factor of kappa light polypeptide gene enhancer in B-cells inhibitor, alpha), RUNX1 (runt-related transcription factor 1), PRKCG (protein kinase C, gamma), RELA (v-rel reticuloendotheliosis viral oncogene homolog A (avian)), PLAU (plasminogen activator, urokinase), BTK (Bruton agammaglobulinemia tyrosine kinase). PRKCB (protein kinase C, beta), CSF1 (colony stimulating factor 1 (macrophage)), POMC (proopiomelanocortin), CEBPB (CCAAT/enhancer binding protein (C/EBP), beta), ROCK1 (Rho-associated, coiled-coil containing protein kinase 1), KDR (kinase insert domain receptor (a type 111 receptor tyrosine kinase)), NPM1 (nucleophosmin (nucleolar phosphoprotein B23, numatrin)), ROCK2 (Rho-associated, coiled-coil containing protein kinase 2), PRKAB1 (protein kinase, AMP-activated, beta 1 non-catalytic subunit), BAK1 (BCL2-antagonist/killer 1), AURKA (aurora kinase A), NTN1 (netrin 1), FLT1 (fms-related tyrosine kinase 1 (vascular endothelial growth factor/vascular permeability factor receptor)), NBN (nibrin), DNM3 (dynamin 3), PRDM10 (PR domain containing 10), PAX5 (paired box 5), EIF4G1 (eukaryotic translation initiation factor 4 gamma, 1), KAT2B (K(lysine) acetyltransferase 2B), TIMP3 (TIMP metallopeptidase inhibitor 3), CCL22 (chemokine (C-C motif) ligand 22), GRIN2B (glutamate receptor, ionotropic, N-methyl D-aspartate 2B), CD81 (CD81 molecule), CCL27 (chemokine (C-C motif) ligand 27), MAPK11 (mitogen-activated protein kinase 11), DKK1 (dickkopf homolog 1 (Xenopus laevis)), HYAL1 (hyaluronoglucosaminidase 1), CTSL1 (cathepsin L1), PKD1 (polycystic kidney disease 1 (autosomal dominant)), BUB1B (budding uninhibited by benzimidazoles 1 homolog beta (yeast)), MPP1 (membrane protein, palmitoylated 1, 55 kDa), SIAH2 (seven in absentia homolog 2 (Drosophila)), DUSP13 (dual specificity phosphatase 13), CCL21 (chemokine (C-C motif) ligand 21), RTN4 (reticulon 4), SMO (smoothened homolog (Drosophila)), CCL19 (chemokine (C-C motif) ligand 19), CSTF2 (cleavage stimulation factor, 3\′ pre-RNA, subunit 2, 64 kDa), RSF1 (remodeling and spacing factor 1), EZH2 (enhancer of zeste homolog 2 (Drosophila)), AKI (adenylate kinase 1), CKM (creatine kinase, muscle), HYAL3 (hyaluronoglucosaminidase 3), ALOX15B (arachidonate 15-lipoxygenase, type B), PAG1 (phosphoprotein associated with glycosphingolipid microdomains 1), MIR21 (microRNA 21), S100A2 (S100 calcium binding protein A2), HYAL2 (hyaluronoglucosaminidase 2), CSTF1 (cleavage stimulation factor, 3V pre-RNA, subunit 1, 50 kDa), PCGF2 (polycomb group ring finger 2), THSD1 (thrombospondin, type 1, domain containing 1), HOPX (HOP homeobox). SLC5A8 (solute carrier family 5 (iodide transporter), member 8), EMB (embigin homolog (mouse)), PAX9 (paired box 9), ARMCX3 (armadillo repeat containing, X-linked 3), ARMCX2 (armadillo repeat containing, X-linked 2), ARMCX1 (armadillo repeat containing, X-linked 1), RASSF4 (Ras association (Ra1GDS/AF-6) domain family member 4), MIR34B (microRNA 34b), MIR205 (microRNA 205), RBI (retinoblastoma 1). DYT10 (dystonia 10), CDKN2A (cyclin-dependent kinase inhibitor 2A (melanoma, p16, inhibits CDK4)), CDKN1A (cyclin-dependent kinase inhibitor 1A (p21, Cip1)), CCND1 (cyclin D1), AKT1 (v-akt murine thymoma viral oncogene homolog 1), MYC (v-myc myelocytomatosis viral oncogene homolog (avian)), CTNNB1 (catenin (cadherin-associated protein), beta 1, 88 kDa), MDM2 (Mdm2 p53 binding protein homolog (mouse)), SERPINB5 (serpin peptidase inhibitor, clade B (ovalbumin), member 5), EGF (epidermal growth factor (beta-urogastrone)), FOS (FBJ murine osteosarcoma viral oncogene homolog), NOS2 (nitric oxide synthase 2, inducible), CDK4 (cyclin-dependent kinase 4), SOD2 (superoxide dismutase 2, mitochondrial), SMAD3 (SMAD family member 3), CDKN1B (cyclin-dependent kinase inhibitor 1B (p27, Kip1)), SOD1 (superoxide dismutase 1, soluble), CCNA2 (cyclin A2), LOX (lysyl oxidase), SMAD4 (SMAD family member 4), HGF (hepatocyte growth factor (hepapoietin A; scatter factor)), THBS1 (thrombospondin 1). CDK6 (cyclin-dependent kinase 6), ATM (ataxia telangiectasia mutated), STAT3 (signal transducer and activator of transcription 3 (acute-phase response factor)), HIF1A (hypoxia inducible factor 1, alpha subunit (basic helix-loop-helix transcription factor)), IGF1R (insulin-like growth factor 1 receptor), MTOR (mechanistic target of rapamycin (serine/threonine kinase)), TSC2 (tuberous sclerosis 2), CDC42 (cell division cycle 42 (GTP binding protein, 25 kDa)), ODC1 (omithine decarboxylase 1), SPARC (secreted protein, acidic, cysteine-rich (osteonectin)), HDAC1 (histone deacetylase 1), CDK2 (cyclin-dependent kinase 2), BARD1 (BRCA1 associated RING domain 1), CDH1 (cadherin 1, type 1, E-cadherin (epithelial)), EGR1 (early growth response 1), INSR (insulin receptor), IRF1 (interferon regulatory factor 1), PHB (prohibitin), PXN (paxillin), HSPA4 (heat shock 70 kDa protein 4), TYR (tyrosinase (oculocutaneous albinism IA)), CAV (caveolin 1, caveolae protein, 22 kDa), CDKN2B (cyclin-dependent kinase inhibitor 2B (p15, inhibits CDK4)), FOX03 (forkhead box 03), HDAC9 (histone deacetylase 9), FBXW7 (F-box and WD repeat domain containing 7), FOX01 (forkhead box 01), E2F1 (E2F transcription factor 1), STK11 (serine/threonine kinase 11), BMP2 (bone morphogenetic protein 2), HSP90AA1 (heat shock protein 90 kDa alpha (cytosolic), class A member 1), HNF4A (hepatocyte nuclear factor 4, alpha), CAMK2G (calciumlcalmodulin-dependent protein kinase II gamma), TP53BP1 (tumor protein p53 binding protein 1), CRYAB (crystallin, alpha B), HMGCR (3-hydroxy-3-mcthylglutaryl-Coenzyme A reductase), PLAUR (plasminogen activator, urokinase receptor), MCL1 (myeloid cell leukemia sequence 1 (BCL2-related)), NOTCH1 (Notch homolog 1, translocation-associated (Drosophila)), RASSF1 (Ras association (RalGDS/AF-6) domain family member 1), GSN (gelsolin), CADM1 (cell adhesion molecule 1), ATF2 (activating transcription factor 2), IFNB1 (interferon, beta 1, fibroblast), DAPK1 (death-associated protein kinase 1), CHFR (checkpoint with forkhead and ring finger domains), KITLG (KIT ligand), NDUFA13 (NADH dehydrogenase (ubiquinone) 1 alpha subcomplex, 13), DPP4 (dipeptidyl-peptidase 4), GLB1 (galactosidase, beta 1), IKZF1 (IKAROS family zinc finger 1 (Ikaros)), ST5 (suppression of tumorigenicity 5), TGFA (transforming growth factor, alpha), EIF4EBP1 (eukaryotic translation initiation factor 4E binding protein 1), TGFBR2 (transforming growth factor, beta receptor II (70/80 kDa)), EIF2AK2 (eukaryotic translation initiation factor 2-alpha kinase 2), GJA1 (gap junction protein, alpha 1, 43 kDa), MYD88 (myeloid differentiation primary response gene (88)), IF127 (interferon, alpha-inducible protein 27), RBMX (RNA binding motif protein, X-linked), EPHA1 (EPH receptor A1), TWSG1 (twisted gastrulation homolog 1 (Drosophila)), H2AFX (H2A histone family, member X), LGALS3 (lectin, galactoside-binding, soluble, 3), MUC3A (mucin 3A, cell surface associated), ILK (integrin-linked kinase), APAF1 (apoptotic peptidase activating factor 1), MAOA (monoamine oxidase A), ERBB3 (v-erb-b2 erythroblastic leukemia viral oncogene homolog 3 (avian)), EIF2S1 (eukaryotic translation initiation factor 2, subunit 1 alpha, 35 kDa), PER2 (period homolog 2 (Drosophila)), IGFBP7 (insulin-like growth factor binding protein 7), KDM5B (lysine (K)-specific demethylase 5B), SMARCA4 (SW/SNF related, matrix associated, actin dependent regulator of chromatin, subfamily a, member 4), NME1 (non-metastatic cells 1, protein (NM23A) expressed in), F2RL1 (coagulation factor II (thrombin) receptor-like 1), ZFP36 (zinc finger protein 36, C3H type, homolog (mouse)), HSPA8 (heat shock 70 kDa protein 8), WNT5A (wingless-type MMTV integration site family, member 5A), ITGB4 (integrin, beta 4), RARB (retinoic acid receptor, beta), VEGFC (vascular endothelial growth factor C), CCL20 (chemokine (C-C motif) ligand 20), EPHB2 (EPH receptor B2). CSNK2A1 (casein kinase 2, alpha 1 polypeptide), PSMD9 (proteasome (prosome, macropain) 26S subunit, non-ATPase, 9), SERPINB2 (serpin peptidase inhibitor, clade B (ovalbumin), member 2), RHOB (ras homolog gene family, member B), DUSP6 (dual specificity phosphatase 6), CDKN1C (cyclin-dependent kinase inhibitor 1C (p57, Kip2)), SLIT2 (slit homolog 2 (Drosophila)), CEACAM1 (carcinoembryonic antigen-related cell adhesion molecule 1 (biliary glycoprotein)), UBC (ubiquitin C), STS (steroid sulfatase (microsomal), isozyme S), FST (follistatin), KRT1 (keratin 1), ETF6 (eukaryotic translation initiation factor 6), JUP (junction plakoglobin), HDAC4 (histone deacetylase 4), NEDD4 (neural precursor cell expressed, developmentally down-regulated 4), KRT14 (keratin 14), GLI2 (GLI family zinc finger 2), MYH11 (myosin, heavy chain 11, smooth muscle), MAPKAPK5 (mitogen-activated protein kinase-activated protein kinase 5), MAD1L1 (MAD1 mitotic arrest deficient-like 1 (yeast)), TNFAIP3 (tumor necrosis factor, alpha-induced protein 3), WEE1 (WEE1 homolog (S. pombe)), BTRC (beta-transducin repeat containing), NKX3-1 (NK3 homeobox 1), GPC3 (glypican 3), CREB3 (cAMP responsive element binding protein 3), PLCB3 (phospholipase C, beta 3 (phosphatidylinositol-specific)), DMPK (dystrophia myotonica-protein kinase), BLNK (B-celllinker), PPIA (peptidylprolyl isomerase A (cyclophilin A)), DAB2 (disabled homolog 2, mitogen-responsive phosphoprotein (Drosophila)), KLF4 (Kruppel-like factor 4 (gut)), RUNX3 (runt-related transcription factor 3), FLG (filaggrin), IVL (involucrin), CCT5 (chaperonin containing TCP1, subunit 5 (epsilon)), LRPAP1 (low density lipoprotein receptor-related protein associated protein 1), IGF2R (insulin-like growth factor 2 receptor), PER (period homolog 1 (Drosophila)), BIK (BCL2-interacting killer (apoptosis-inducing)), PSMC4 (proteasome (prosome, macropain) 26S subunit. ATPase, 4), USF2 (upstream transcription factor 2, c-fos interacting), GAS1 (growth arrest-specific 1), LAMP2 (lysosomal-associated membrane protein 2), PSMD10 (proteasome (prosome, macropain) 26S subunit, non-ATPase, 10), IL24 (interleukin24), GADD45G (growth arrest and DNA-damage-inducible, gamma), ARHGAP1 (Rho GTPase activating protein 1), CLDN1 (claudin 1), ANXA7 (annexin A7), CHN1 (chimerin (chimaerin) 1), TXNIP (thioredoxin interacting protein), PEG3 (paternally expressed 3), EIF3A (eukaryotic translation initiation factor 3, subunit A), CASC5 (cancer susceptibility candidate 5), TCF4 (transcription factor 4), CSNK2A2 (casein kinase 2, alpha prime polypeptide), CSNK2B (casein kinase 2, beta polypeptide), CRY1 (cryptochrome 1 (photolyase-like)), CRY2 (cryptochrome 2 (photolyase-like)), EIF4G2 (eukaryotic translation initiation factor 4 gamma, 2), LOXL2 (lysyl oxidase-like 2), PSMD13 (proteasome (prosome, macropain) 26S subunit, non-ATPase, 13), ANP32A (acidic (leucine-rich) nuclear phosphoprotein 32 family, member A), COL4A3 (collagen, type IV, alpha 3 (Goodpasture antigen)), SCGB1A1 (secretoglobin, family 1A, member 1 (uteroglobin)), BNIP3L (BCL2/adenovirus E1B19 kDa interacting protein 3-like), MCC (mutated in colorectal cancers), EFNB3 (ephrin-B3), RBBP8 (retinoblastoma binding protein 8), PALB2 (partner and localizer of BRCA2), HBP1 (HMG-box transcription factor 1), MRPL28 (mitochondrial ribosomal protein L28), KDM5A (lysine (K)-specific demethylase SA), QSOX1 (quiescin Q6 sulfhydryl oxidase 1), ZFR (zinc finger RNA binding protein), MN1 (meningioma (disrupted in balanced translocation) 1), SMYD4 (SET and MYND domain containing 4), USP7 (ubiquitin specific peptidase 7 (herpes virus-associated)), STK4 (serine/threonine kinase 4), THY1 (Thy-1 cell surface antigen), PTPRG (protein tyrosine phosphatase, receptor type, G), E2F6 (E2F transcription factor 6), STX11 (syntaxin 11), CDC42BPA (CDC42 binding protein kinase alpha (DMPK-like)), MYOCD (myocardin), DAP (death-associated protein), LOXL1 (lysyl oxidase-like 1), RNF139 (ring finger protein 139), HTATIP2 (HIV-1 Tat interactive protein 2, 30 kDa), AIM1 (absent in melanoma 1), BCC1P (BRCA2 and CDKN1A interacting protein), LOXL4 (lysyl oxidase-like 4), WWC (WW and C2 domain containing 1), LOXL3 (lysyl oxidase-like 3), CENPN (centromere protein N), TNS4 (tensin 4), SIK1 (salt-inducible kinase 1), PCGF6 (polycomb group ring finger 6), PHLDA3 (pleckstrin homology-like domain, family A, member 3), IL32 (interleukin 32), LATS1 (LATS, large tumor suppressor, homolog 1 (Drosophila)), COMMD7 (COMM domain containing 7), CDHR2 (cadherin-related family member 2), LELP1 (late cornified envelope-like proline-rich 1), NCRNA00188 (non-protein coding RNA 188), and ENSG00000131023, and combinations thereof.

[0345] Examples of proteins associated with a secretase disorder include PSENEN (presenilin enhancer 2 homolog (C. elegans)), CTSB (cathepsin B), PSEN1 (presenilin 1), APP (amyloid beta (A4) precursor protein), APH1B (anterior pharynx defective 1 homolog B (C. elegans)), PSEN2 (presenilin 2 (Alzheimer disease 4)), BACE1 (beta-site APP-cleaving enzyme 1), ITM2B (integral membrane protein 2B), CTSD (cathepsin D), NOTCH1 (Notch homolog 1, translocation-associated (Drosophila)), TNF (tumor necrosis factor (TNF superfamily, member 2)), INS (insulin), DYT10 (dystonia 10), ADAM17 (ADAM metallopeptidase domain 17), APOE (apolipoprotein E), ACE (angiotensin I converting enzyme (peptidyl-dipeptidase A) 1), STN (statin), TP53 (tumor protein p53), IL6 (interleukin 6 (interferon, beta 2)), NGFR (nerve growth factor receptor (TNFR superfamily, member 16)), IL1B (interleukin 1, beta), ACHE (acetylcholinesterase (Yt blood group)), CTNNB1 (catenin (cadherin-associated protein), beta 1, 88 kDa), IGF1 (insulin-like growth factor 1 (somatomedin C)), IFNG (interferon, gamma), NRG1 (neuregulin 1), CASP3 (caspase 3, apoptosis-related cysteine peptidase), MAPK1 (mitogen-activated protein kinase 1), CDH1 (cadherin 1, type 1, E-cadherin (epithelial)), APBB1 (amyloid beta (A4) precursor protein-binding, family B, member 1 (Fe65)), HMGCR (3-hydroxy-3-methylglutaryl-Coenzyme A reductase), CREB1 (cAMP responsive element binding protein 1), PTGS2 (prostaglandin-endoperoxide synthase 2 (prostaglandin G/H synthase and cyclooxygenase)), HES1 (hairy and enhancer of split 1, (Drosophila)), CAT (catalase), TGFB1 (transforming growth factor, beta 1), EN02 (enolase 2 (gamma, neuronal)), ERBB4 (v-erb-a erythroblastic leukemia viral oncogene homolog 4 (avian)), TRAPPC10 (trafficking protein particle complex 10), MAOB (monoamine oxidase B), NGF (nerve growth factor (beta polypeptide)), MMP12 (matrix metallopeptidase 12 (macrophage elastase)), JAG1 (jagged 1 (Alagille syndrome)), CD40LG (CD40 ligand), PPARG (peroxisome proliferator-activated receptor gamma), FGF2 (fibroblast growth factor 2 (basic)), IL3 (interleukin3 (colony-stimulating factor, multiple)), LRP1 (low density lipoprotein receptor-related protein 1), NOTCH4 (Notch homolog 4 (Drosophila)), MAPKS (mitogen-activated protein kinase 8), PREP (prolyl endopeptidase), NOTCH3 (Notch homolog 3 (Drosophila)), PRNP (prion protein), CTSG (cathepsin G), EGF (epidermal growth factor (beta-urogastrone)), REN (renin), CD44 (CD44 molecule (Indian blood group)), SELP (selectin P (granule membrane protein 140 kDa, antigen CD62)), GHR (growth hormone receptor), ADCYAP1 (adenylate cyclase activating polypeptide 1 (pituitary)), INSR (insulin receptor), GFAP (glial fibrillary acidic protein), MMP3 (matrix metallopeptidase 3 (stromelysin 1, progelatinase)), MAPK10 (mitogen-activated protein kinase 10), SP1 (Sp1 transcription factor), MYC (v-myc myelocytomatosis viral oncogene homolog (avian)), CTSE (cathepsin E), PPARA (peroxisome proliferator-activated receptor alpha), JUN (jun oncogene), TIMP1 (TIMP metallopeptidase inhibitor 1), IL5 (interleukin 5 (colony-stimulating factor, eosinophil)), ILIA (interleukin 1, alpha), MMP9 (matrix metallopeptidase 9 (gelatinase B, 92 kDa gelatinase, 92 kDa type IV collagenase)), HTR4 (5-hydroxytryptamine (serotonin) receptor 4), HSPG2 (heparan sulfate proteoglycan 2), KRAS (v-Ki-ras2 Kirsten rat sarcoma viral oncogene homolog), CYCS (cytochrome c, somatic), SMG1 (SMG1 homolog, phosphatidylinositol3-kinase-related kinase (C. elegans)), IL1R1 (interleukin 1 receptor, type I), PROK1 (prokineticin 1), MAPK3 (mitogen-activated protein kinase 3), NTRK1 (neurotrophic tyrosine kinase, receptor, type 1), IL13 (interleukin 13), MME (membrane metallo-endopeptidase), TKT (transketolase), CXCR2 (chemokine (C-X-C motif) receptor 2), IGF1R (insulin-like growth factor 1 receptor), RARA (retinoic acid receptor, alpha), CREBBP (CREB binding protein), PTGS1 (prostaglandin-endoperoxide synthase 1 (prostaglandin G/H synthase and cyclooxygenase)), GALT (galactose-1-phosphate uridylyltransferase), CHRM1 (cholinergic receptor, muscarinic 1), ATXN1 (ataxin 1), PAWR (PRKC, apoptosis, WT1, regulator), NOTCH2 (Notch homolog 2 (Drosophila)), M6PR (mannose-6-phosphate receptor (cation dependent)), CYP46A1 (cytochrome P450, family 46, subfamily A, polypeptide 1), CSNK1D (casein kinase 1, delta), MAPK14 (mitogen-activated protein kinase 14), PRG2 (proteoglycan 2, bone marrow (natural killer cell activator, eosinophil granule major basic protein)), PRKCA (protein kinase C, alpha), L1CAM (L1 cell adhesion molecule), CD40 (CD40 molecule, TNF receptor superfamily member 5), NR1I2 (nuclear receptor subfamily 1, group 1, member 2), JAG2 (jagged 2), CTNND1 (catenin (cadherin-associated protein), delta 1), CDH2 (cadherin 2, type 1, N-cadherin (neuronal)), CMA1 (chymase 1, mast cell), SORT1 (sortilin 1), DLK1 (delta-like 1 homolog (Drosophila)), THEM4 (thioesterase superfamily member 4), JUP (junction plakoglobin), CD46 (CD46 molecule, complement regulatmy protein), CCL11 (chemokine (C-C motif) ligand 11), CAV3 (caveolin 3), RNASE3 (ribonuclease, RNase A family, 3 (eosinophil cationic protein)), HSPAS (heat shock 70 kDa protein 8), CASP9 (caspase 9, apoptosis-related cysteine peptidase), CYP3A4 (cytochrome P450, family 3, subfamily A, polypeptide 4), CCR3 (chemokine (C-C motif) receptor 3), TFAP2A (transcription factor AP-2 alpha (activating enhancer binding protein 2 alpha)), SCP2 (sterol carrier protein 2), CDK4 (cyclin-dependent kinase 4), HIF1A (hypoxia inducible factor 1, alpha subunit (basic helix-loop-helix transcription factor)), TCF7L2 (transcription factor 7-like 2 (T-cell specific, HMG-box)), IL1R2 (interleukin 1 receptor, type II), B3GALTL (beta 1,3-galactosyltransferase-like), MDM2 (Mdm2 p53 binding protein homolog (mouse)), RELA (v-rel reticuloendotheliosis viral oncogene homolog A (avian)), CASP7 (caspase 7, apoptosis-related cysteine peptidase), IDE (insulin-degrading enzyme), FABP4 (fatty acid binding protein 4, adipocyte), CASK (calcium/calmodulin-dependent serine protein kinase (MAGUK family)), ADCYAP1R1 (adenylate cyclase activating polypeptide 1 (pituitary) receptor type I), ATF4 (activating transcription factor 4 (tax-responsive enhancer element B67)), PDGFA (platelet-derived growth factor alpha polypeptide), C21orf33 (chromosome 21 open reading frame 33), SCG5 (secretogranin V (7B2 protein)), RNF123 (ring finger protein 123), NFKB1 (nuclear factor of kappa light polypeptide gene enhancer in B-cells 1), ERBB2 (v-erb-b2 erythroblastic leukemia viral oncogene homolog 2, neuro/glioblastoma derived oncogene homolog (avian)), CAV (caveolin 1, caveolae protein, 22 kDa), MMP7 (matrix metallopeptidase 7 (matrilysin, uterine)), TGFα (transforming growth factor, alpha), RXRA (retinoid X receptor, alpha), STX1A (syntaxin 1A (brain)), PSMC4 (proteasome (prosome, macropain) 26S subunit, ATPase, 4), P2RY2 (purinergic receptor P2Y, G-protein coupled, 2), TNFRSF21 (tumor necrosis factor receptor superfamily, member 21), DLG1 (discs, large homolog 1 (Drosophila)), NUMBL (numb homolog (Drosophila)-like), SPN (sialophorin), PLSCR1 (phospholipid scramblase 1), UBQLN2 (ubiquilin 2), UBQLN1 (ubiquilin 1), PCSK7 (proprotein convertase subtilisin/kexin type 7), SPON1 (spondin 1, extracellular matrix protein), SILV (silver homolog (mouse)), QPCT (glutaminyl-peptide cyclotransferase), HESS (hairy and enhancer of split 5 (Drosophila)), GCC1 (GRIP and coiled-coil domain containing 1), and any combination thereof.

[0346] Examples of proteins associated with Amyotrophic Lateral Sclerosis include SOD1 (superoxide dismutase 1), ALS2 (amyotrophic lateral sclerosis 2), FUS (fused in sarcoma), TARDBP (TAR DNA binding protein), VAGFA (vascular endothelial growth factor A), VAGFB (vascular endothelial growth factor B), and VAGFC (vascular endothelial growth factor C), and any combination thereof.

[0347] Examples of proteins associated with prion diseases include SOD1 (superoxide dismutase 1), ALS2 (amyotrophic lateral sclerosis 2), FUS (fused in sarcoma), TARDBP (TAR DNA binding protein), VAGFA (vascular endothelial growth factor A), VAGFB (vascular endothelial growth factor B), and VAGFC (vascular endothelial growth factor C), and any combination thereof. Examples of proteins related to neurodegenerative conditions in prion disorders include A2M (Alpha-2-Macroglobulin), AATF (Apoptosis antagonizing transcription factor), ACPP (Acid phosphatase prostate), ACTA2 (Actin alpha 2 smooth muscle aorta), ADAM22 (ADAM metallopeptidase domain), ADORA3 (Adenosine A3 receptor), ADRA1D (Alpha-1D adrenergic receptor for Alpha-1D adrenoreceptor), AHSG (Alpha-2-HS-glycoprotein), A1F1 (Allograft inflammatory factor 1), ALAS2 (Delta-aminolevulinate synthase 2), AMBP (Alpha-1-microglobulinibikunin precursor), ANK3 (Ankryn 3), ANXA3 (Annexin A3), APCS (Amyloid P component serum), APOA (Apolipoprotein A1), APOA12 (Apolipoprotein A2), APOB (Apolipoprotein B), APOC1 (Apolipoprotein C1), APOE (Apolipoprotein E), APOH (Apolipoprotein H), APP (Amyloid precursor protein), ARC (Activity-regulated cytoskeleton-associated protein), ARF6 (ADP-ribosylation factor 6), ARHGAP5 (Rho GTPase activating protein 5), ASCL1 (Achaete-scute homolog 1), B2M (Beta-2 microglobulin), B4GALNT1 (Beta-1,4-N-acetyl-galactosaminyl transferase 1), BAX (Bel-2-associated X protein), BCAT (Branched chain amino-acid transaminase 1 cytosolic), BCKDHA (Branched chain keto acid dehydrogenase E1 alpha), BCKDK (Branched chain alpha-ketoacid dehydrogenase kinase), BCL2 (B-celllymphoma 2), BCL2L1 (BCL2-like 1), BDNF (Brain-derived neurotrophic factor), BHLHE40 (Class E basic helix-loop-helix protein 40), BHLHE41 (Class E basic helix-loop-helix protein 41), BMP2 (Bone morphogenetic protein 2A), BMP3 (Bone morphogenetic protein 3), BMP5 (Bone morphogenetic protein 5), BRD1 (Bromodomain containing 1), BTC (Betacellulin), BTNL8 (Butyrophilin-like protein 8), CALB1 (Calbindin 1), CALM1 (Calmodulin 1), CAMK1 (Calcium/calmodulin-dependent protein kinase type 1), CAMK4 (Calcium/calmodulin-dependent protein kinase type IV), CAMKIIB (Calcium/calmodulin-dependent protein kinase type IIB), CAMKIIG (Calcium/calmodulin-dependent protein kinase type IIG), CASP11 (Caspase-10), CASP8 (Caspase 8 apoptosis-related cysteine peptidase), CBLN1 (cerebellin 1 precursor), CCL2 (Chemokine (C-C motif) ligand 2), CCL22 (Chemokine (C-C motif) ligand 22), CCL3 (Chemokine (C-C motif) ligand 3), CCL8 (Chemokine (C-C motif) ligand 8), CCNG1 (Cyclin-G1), CCNT2 (Cyclin T2), CCR4 (C-C chemokine receptor type 4 (CD194)), CD58 (CD58), CD59 (Protectin), CD5L (CD5 antigen-like), CD93 (CD93), CDKN2AIP (CDKN2A interacting protein), CDKN2B (Cyclin-dependent kinase inhibitor 2B), CDX1 (Homeobox protein CDX-1), CEA (Carcinoembryonic antigen), CEBPA (CCAAT/enhancer-binding protein alpha), CEBPB (CCAAT/enhancer binding protein C/EBP beta), CEBPB (CCAAT/enhancer-binding protein beta), CEBPD (CCAAT/enhancer-binding protein delta), CEBPG (CCAAT/enhancer-binding protein gamma), CENPB (Centromere protein B), CGA (Glycoprotein hormone alpha chain), CGGBP1 (CGG triplet repeat-binding protein 1), CHGA (Chromogranin A), CHGB (Secretoneurin), CHN2 (Beta-chimaerin), CHRD (Chordin), CHRM1 (Cholinergic receptor muscarinic 1), CITED2 (Cbp/p300-interacting transactivator 2), CLEC4E (C-type lectin domain family 4 member E), CMTM2 (CKLF-like MARVEL transmembrane domain-containing protein 2), CNTN1 (Contactin 1), CNTNAP1 (Contactin-associated protein-like 1), CR1 (Erythrocyte complement receptor 1), CREM (cAMP-responsive element modulator), CRH (Corticotropin-releasing hormone), CRHR1 (Corticotropin releasing hormone receptor 1), CRKRS (Cell division cycle 2-related protein kinase 7), CSDA (DNA-binding protein A), CSF3 (Granulocyte colony stimulating factor 3), CSF3R (Granulocyte colony-stimulating factor 3 receptor), CSP (Chemosensory protein), CSPG4 (Chondroitin sulfate proteoglycan 4), CTCF (CCCTC-binding factor zinc finger protein), CTGF (Connective tissue growth factor), CXCL12 (Chemokine C-X-C motifligand 12), DAD1 (Defender against cell death 1), DAXX (Death associated protein 6), DBN1 (Drebrin 1), DBP (D site of albumin promoter-albumin D-box binding protein), DDR1 (Discoidin domain receptor family member 1), DDX14 (DEAD (SEQ ID NO: 532)/DEAN (SEQ ID NO: 533) box helicase), DEFA3 (Defensin alpha 3 neutrophil-specific), DVL3 (Dishevelled dsh homolog 3), EDN1 (Endothelin 1), EDNRA (Endothelin receptor type A), EGF (Epidermal growth factor), EGFR (Epidermal growth factor receptor), EGR1 (Early growth response protein 1), EGR2 (Early growth response protein 2), EGR3 (Early growth response protein 3), EIF2AK2 (Eukaryotic translation initiation factor 2-alpha kinase 2), ELANE (Elastase neutrophil expressed), ELK1 (ELK1 member of ETS oncogene family), ELK3 (ELK3 ETS-domain protein (SRF accessory protein 2)), EML2 (Echinoderm microtubule associated protein like 2), EPHA4 (EPH receptor A4), ERBB2 (V-erb-b2 erythroblastic leukemia viral oncogene homolog 2), ERBB3 (Receptor tyrosine-protein kinase erbB-3), ESR2 (Estrogen receptor 2), ESR2 (Estrogen receptor 2), ETS1 (V-cts erythroblastosis virus E26 oncogene homolog 1), ETV6 (Ets variant 6), FASLG (Fas ligand TNF superfamily member 6), FCAR (Fe fragment of IgA receptor), FCER1G (Fe fragment of IgE high affinity 1 receptor for gamma polypeptide), FCGR2A (Fc fragment of IgG low affinity IIa receptor-CD32), FCGR3B (Fc fragment of IgG low affinity IIIb receptor-CD16b), FCGRT (Fc fragment of IgG receptor transporter alpha), FGA (Basic fibrinogen), FGF1 (Acidic fibroblast growth factor 1), FGF14 (Fibroblast growth factor 14), FGF16 (fibroblast growth factor 16), FGF18 (Fibroblast growth factor 18), FGF2 (Basic fibroblast growth factor 2), FIBP (Acidic fibroblast growth factor intracellular binding protein), FIGF (C-fos induced growth factor), FMR1 (Fragile X mental retardation 1), FOSB (FBJ murine osteosarcoma viral oncogene homolog B), FOXO1 (Forkhead box O1), FSHB (Follicle stimulating hormone beta polypeptide), FTH1 (Ferritin heavy polypeptide 1), FTL (Ferritin light polypeptide), G1P3 (Interferon alpha-inducible protein 6), G6S(N-acetylglucosamine-6-sulfatase), GABRA2 (Gamma-aminobutyric acid A receptor alpha 2), GABRA3 (Gamma-aminobutyric acid A receptor alpha 3), GABRA4 (Gamma-aminobutyric acid A receptor alpha 4), GABRB1 (Gamma-aminobutyric acid A receptor beta 1), GABRG1 (Gamma-aminobutyric acid A receptor gamma 1), GADD45A (Growth arrest and DNA-damage-inducible alpha), GCLC (Glutamate-cysteine ligase catalytic subunit), GDF15 (Growth differentiation factor 15), GDF9 (Growth differentiation factor 9), GFRA1 (GDNF family receptor alpha 1), GIT1 (G protein-coupled receptor kinase interactor 1), GNA13 (Guanine nucleotide-binding protein/G protein alpha 13), GNAQ (Guanine nucleotide binding protein/G protein q polypeptide), GPR12 (G protein-coupled receptor 12), GPR18 (G protein-coupled receptor 18), GPR22 (G protein-coupled receptor 22), GPR26 (G protein-coupled receptor 26), GPR27 (G protein-coupled receptor 27), GPR77 (G protein-coupled receptor 77), GPR85 (G protein-coupled receptor 85), GRB2 (Growth factor receptor-bound protein 2), GRLF1 (Glucocorticoid receptor DNA binding factor 1), GST (Glutathione S-transferase), GTF2B (General transcription factor IIB), GZMB (Granzyme B), HAND1 (Heart and neural crest derivatives expressed 1), HAVCR1 (Hepatitis A virus cellular receptor 1), HES1 (Hairy and enhancer of split 1), HESS (Hairy and enhancer of split 5), HLA-DQA1 (Major histocompatibility complex class II DQ alpha), HOXA2 (Homeobox A2), HOXA4 (Homeobox A4), HP (Haptoglobin), HPGDS (Prostaglandin-D synthase), HSPA8 (Heat shock 70 kDa protein 8), HTRIA (5-hydroxytryptamine receptor 1A), HTR2A (5-hydroxytryptamine receptor 2A), HTR3A (5-hydroxytryptamine receptor 3A), ICAM1 (Intercellular adhesion molecule 1 (CD54)), IFIT2 (Interferon-induced protein with tetratricopeptide repeats 2), IFNAR2 (Interferon alpha/beta/omega receptor 2), IGF1 (Insulin-like growth factor 1), IGF2 (Insulin-like growth factor 2), IGFBP2 (Insulin-like growth factor binding protein 2, 36 kDa), IGFBP7 (Insulin-like growth factor binding protein 7), IL10 (Interleukin 10), IL10RA (Interleukin 10 receptor alpha), IL11 (Interleukin 11), IL11RA (Interleukin 11 receptor alpha), IL11RB (Interleukin 11 receptor beta), IL13 (Interleukin 13), IL15 (Interleukin 15), IL17A (Interleukin 17A), IL17RB (interleukin 17 receptor B), IL18 (Interleukin 18), IL18RAP (Interleukin 18 receptor accessory protein), IL1R2 (Interleukin 1 receptor type II), IL1RN (Interleukin 1 receptor antagonist), IL2RA (Interleukin 2 receptor alpha), IL4R (Interleukin 4 receptor), IL6 (Interleukin 6), IL6R (Interleukin 6 receptor), IL7 (Interleukin 7), IL8 (Interleukin 8), IL8RA (Interleukin 8 receptor alpha), IL8RB (Interleukin 8 receptor beta), ILK (Integrin-linked kinase), INPP4A (Inositol polyphosphate-4-phosphatase type 1, 107 kDa), INPP4B (Inositol polyphosphate-4-phosphatase type 1 beta), INS (Insulin), IRF2 (Interferon regulatory factor 2), IRF3 (Interferon regulatory factor 3), IRF9 (Interferon regulatory factor 9), IRS1 (Insulin receptor substrate 1), ITGA4 (integrin alpha 4), ITGA6 (Integrin alpha-6), ITGAE (Integrin alpha E), ITGAV (Integrin alpha-V), JAG1 (Jagged 1), JAK1 (Janus kinase 1), JDP2 (Jun dimerization protein 2), JUN (Jun oncogene), JUNB (Jun B proto-oncogene), KCNJ15 (Potassium inwardly-rectifying channel subfamily J member 15), KTF5B (Kinesin family member 5B), KLRC4 (Killer cell lectin-like receptor subfamily C member 4), KRT8 (Keratin 8), LAMP2 (Lysosomal-associated membrane protein 2), LEP (Leptin), LHB (Luteinizing hormone beta polypeptide), LRRN3 (Leucine rich repeat neuronal 3), MAL (Mal T-cell differentiation protein), MANIA (Mannosidase alpha class 1A member 1), MAOB (Monoamine oxidase B), MAP3K1 (Mitogen-activated protein kinase kinase kinase 1), MAPK1 (Mitogen-activated protein kinase 1), MAPK3 (Mitogen-activated protein kinase 3), MAPRE2 (Microtubule-associated protein RP/EB family member 2), MARCKS (Myristoylated alanine-rich protein kinase C substrate), MAS1 (MAS1 oncogene), MASL1 (MAS1 oncogene-like), MBP (Myelin basic protein), MCL1 (Myeloid cell leukemia sequence 1), MDMX (MDM2-like p53-binding protein), MECP2 (Methyl CpG binding protein 2), MFGE8 (Milk fat globule-EGF factor 8 protein), MIF (Macrophage migration inhibitory factor), MMP2 (Matrix metallopeptidase 2), MOBP (Myclin-associated oligodendrocyte basic protein), MUC16 (Cancer antigen 125), MX2 (Myxovirus (influenza virus) resistance 2), MYBBP1A (MYB binding protein 1a), NBN (Nibrin), NCAM1 (Neural cell adhesion molecule 1), NCF4 (Neutrophil cytosolic factor 4 40 kDa), NCOA1 (Nuclear receptor coactivator 1), NCOA2 (Nuclear receptor coactivator 2), NEDD9 (Neural precursor cell expressed developmentally down-regulated 9), NEUR (Neuraminidase), NFATC1 (Nuclear factor of activated T-cells cytoplasmic calcineurin-dependent 1), NFE2L2 (Nuclear factor erythroid-derived 2-like 2), NFIC (Nuclear factor 1/C), NFKB1A (Nuclear factor of kappa light polypeptide gene enhancer in B-cells inhibitor alpha), NGFR (Nerve growth factor receptor), NIACR2 (niacin receptor 2), NLGN3 (Neuroligin 3), NPFFR2 (neuropeptide FF receptor 2), NPY (Neuropeptide Y), NR3C2 (Nuclear receptor subfamily 3 group C member 2), NRAS (Neuroblastoma RAS viral (v-ras) oncogene homolog), NRCAM (Neuronal cell adhesion molecule), NRG1 (Neuregulin 1), NRTN (Neurturin), NRXN1 (Neurexin 1), NSMAF (Neutral sphingomyelinase activation associated factor), NTF3 (Neurotrophin 3), NTF5 (Neurotrophin 4/5), ODC1 (Ornithine decarboxylase 1), OR10A1 (Olfactory receptor 10A1), OR1A1 (Olfactory receptor family 1 subfamily A member 1), ORIN1 (Olfactory receptor family 1 subfamily N member 1), OR3A2 (Olfactory receptor family 3 subfamily A member 2), OR7A17 (Olfactory receptor family 7 subfamily A member 17), ORM1 (Orosomucoid 1), OXTR (Oxytocin receptor), P2RY13 (Purinergic receptor P2Y G-protein coupled 13), P2Y12 (Purinergic receptor P2Y G-protein coupled 12), P70S6K (P70S6 kinase), PAK1 (P21/Cdc42/Rac1-activatedkinase 1), PAR1 (Prader-Willi/Angelman region-1), PBEF1 (Pre-B-cell colony enhancing factor 1), PCAF (P300/CBP-associated factor), PDE4A (cAMP-specific 3′,5′-cyclic phosphodiesterase 4A), PDE4B (Phosphodiesterase 4B cAMP-specific), PDE4B (Phosphodiesterase 4B cAMP-specific), PDE4D (Phosphodiesterase 4D cAMP-specific), PDGFA (Platelet-derived growth factor alpha polypeptide), PDGFB (Platelet-derived growth factor beta polypeptide), PDGFC (Platelet derived growth factor C), PDGFRB (Beta-type platelet-derived growth factor receptor), PDPN (Podoplanin), PENK (Enkephalin), PER1 (Period homolog 1), PLA2 (Phospholipase A2), PLAU (Plasminogen activator urokinase), PLXNC1 (Plexin C1), PMVK (Phosphomevalonate kinase), PNOC (Prepronociceptin), POLH (Polymerase (DNA directed) eta), POMC (Proopiomelanocmiin (adrenocorticotropin/beta-lipotropin/alpha-melanocyte stimulating hormone/beta-melanocyte stimulating hormone/beta-endorphin)), POU2AF1 (POU domain class 2 associating factor 1), PRKAA1 (5′-AMP-activated protein kinase catalytic subunit alpha-1), PRL (Prolactin), PSCDBP (Cytohesin 1 interacting protein), PSPN (Persephin), PTAFR (Platelet-activating factor receptor), PTGS2 (Prostaglandin-endoperoxide synthase 2), PTN (Pleiotrophin), PTPN11 (Protein tyrosine phosphatase non-receptor type 11), PYY (Peptide YY), RAB11B (RAB11B member RAS oncogene family), RAB6A (RAB6A member RAS oncogene family), RAD17 (RAD17 homolog), RAF1 (RAF proto-oncogene serine/threonine-protein kinase), RANBP2 (RAN binding protein 2), RAP1A (RAP1A member of RAS oncogene family), RBI (Retinoblastoma 1), RBL2 (Retinoblastoma-like 2 (p130)), RCVRN (Recoverin), REM2 (RAS/RAD/GEM-like GTP binding 2), RFRP (RFamide-related peptide), RPS6KA3 (Ribosomal protein S6 kinase 90 kDa polypeptide 3), RTN4 (Reticulon 4), RUNX1 (Runt-related transcription factor 1), S100A4 (S100 calcium binding protein A4), S1PR1 (Sphingosine-1-phosphate receptor 1), SCG2 (Secretogranin 11), SCYE (Small inducible cytokine subfamily E member 1), SELENBP1 (Selenium binding protein 1), SGK (Serum/glucocorticoid regulated kinase), SKD1 (Suppressor of K+ transport growth defect 1), SLC14A (Solute carrier family 14 (urea transporter) member 1 (Kidd blood group)), SLC25A37 (Solute carrier family 25 member 37), SMAD2 (SMAD family member 2), SMAD5 (SMAD family member 5), SNAP23 (Synaptosomal-associated protein 23 kDa), SNCB (Synuclein beta), SNFILK (SNF1-like kinase), SORT1 (Sortilin 1), SSB (Sjogren syndrome antigen B), STAT1 (Signal transducer and activator of transcription 1, 91 kDa), STAT5A (Signal transducer and activator of transcription 5A), STAT5B (Signal transducer and activator of transcription 5B), STX16 (Syntaxin 16), TAC1 (Tachykinin precursor 1), TBX1 (T-box 1), TEF (Thyrotrophic embryonic factor), TF (Transferrin), TGFA (Transforming growth factor alpha), TGFB1 (Transforming growth factor beta 1), TGFB2 (Transforming growth factor beta 2), TGFB3 (Transforming growth factor beta 3), TGFBR1 (Transforming growth factor beta receptor 1), TGM2 (Transglutaminase 2), THPO (Thrombopoietin), TIMP1 (TIMP metallopeptidase inhibitor 1), TIMP3 (TIMP metallopeptidase inhibitor 3), TMEM129 (Transmembrane protein 129), TNFRC6 (TNFR/NGFR cysteine-rich region), TNFRSF10A (Tumor necrosis factor receptor superfamily member 10a), TNFRSF10C (Tumor necrosis factor receptor superfamily member 10c decoy without an intracellular domain), TNFRSF1A (Tumor necrosis factor receptor superfamily member 1A), TOB2 (Transducer of ERBB2 2), TOP1 (Topoisomerase (DNA) I), TOPOII (Topoisomerase 2), TRAK2 (Trafficking protein kinesin binding 2), TRH (Thyrotropin-releasing hormone), TSH (Thyroid-stimulating hormone alpha), TUBA1A (Tubulin alpha 1a), TXK (TXK tyrosine kinase), TYK2 (Tyrosine kinase 2), UCP1 (Uncoupling protein 1), UCP2 (Uncoupling protein 2), ULP (Unc-33-like phosphoprotein), UTRN (Utrophin), VEGF (Vascular endothelial growth factor), VGF (VGF nerve growth factor inducible), VIP (Vasoactive intestinal peptide), VNN1 (Vanin 1), VTN (Vitronectin), WNT2 (Wingless-type MMTV integration site family member 2), XRCC6 (X-ray repair cross-complementing 6), ZEB2 (Zinc finger E-box binding homeobox 2), and ZNF461 (Zinc finger protein 461).

[0348] Examples of proteins associated with Immunodeficiency include A2M [alpha-2-macroglobulin]; AANAT [arylalkylarnine N-acetyltransferase]; ABCA 1 [ATP-binding cassette, sub-family A (ABC1), member 1]; ABCA2 [ATP-binding cassette, sub-family A (ABC1), member 2]; ABCA3 [ATP-binding cassette, sub-family A (ABC1), member 3]; ABCA4 [ATP-binding cassette, sub-family A (ABC1), member 4]; ABCB1 [ATP-binding cassette, sub-family B (MDR/TAP), member 1]; ABCC1 [ATP-binding cassette, sub-family C (CFTR/MRP), member 1]; ABCC2 [ATP-binding cassette, sub-family C (CFTR/MRP), member 2]; ABCC3 [ATP-binding cassette, sub-family C (CFTR/MRP), member 3]; ABCC4 [ATP-binding cassette, sub-family C (CFTR/MRP), member 4]; ABCC8 [ATP-binding cassette, sub-family C (CFTR/MRP), member 8]; ABCD2 [ATP-binding cassette, sub-family D (ALD), member 2]; ABCD3 [ATP-binding cassette, sub-family D (ALD), member 3]; ABCG1 [ATP-binding cassette, sub-family G (WHITE), member 1]; ABCC2 [ATP-binding cassette, sub-family G (WHITE), member 2]; ABCG5 [ATP-binding cassette, sub-family G (WHITE), member 5]; ABCC8 [ATP-binding cassette, sub-family G (WHITE), member 8]; ABHD2 [abhydrolase domain containing 2]; ABL1 [c-abl oncogene 1, receptor tyrosine kinase]; ABO [ABO blood group (transferase A, alpha 1-3-N-acetylgalactosaminyltransferase; transferase B, alpha 1-3-galactosyltransferase)]; ABP1 [amiloride binding protein 1 (amine oxidase (copper-containing))]; ACAA1 [acetyl-Coenzyme A acyltransferase 1]; ACACA [acetyl-Coenzyme A carboxylase alpha]; ACAN [aggrecan]; ACAT [acetyl-Coenzyme A acetyltransferase 1]; ACAT2 [acetyl-Coenzyme A acetyltransferase 2]; ACCN5 [amiloride-sensitive cation channel 5, intestinal]; ACE [angiotensin I converting enzyme (peptidyl-dipeptidase A) 1]; ACE2 [angiotensin I converting enzyme (peptidyl-dipeptidase A) 2]; ACHE [acetylcholinesterase (Yt blood group)]; ACLY [ATP citrate lyase]; ACOT9 [acyl-CoA thioesterase 9]; ACOX1 [acyl-Coenzyme A oxidase 1, palmitoyl]; ACP1 [acid phosphatase 1, soluble]; ACP2 [acid phosphatase 2, lysosomal]; ACP5 [acid phosphatase 5, tartrate resistant]; ACPP [acid phosphatase, prostate]; ACSL3 [acyl-CoA synthetase long-chain family member 3]; ACSM3 [acyl-CoA synthetase medium-chain family member 3]; ACTA1 [actin, alpha 1, skeletal muscle]; ACTA2 [actin, alpha 2, smooth muscle, aorta]; ACTB [actin, beta]; ACTC1 [actin, alpha, cardiac muscle 1]; ACTG1 [actin, gamma 1]; ACTN1 [actinin, alpha 1]; ACTN2 [actinin, alpha 2]; ACTN4 [actinin, alpha 4]; ACTR2 [ARP2 actin-related protein 2 homolog (yeast)]; ACVR1 [activin A receptor, type I]; ACVR1B [activin A receptor, type IB]; ACVRL1 [activin A receptor type II-like 1]; ACY1 [aminoacylase 1]; ADA [adenosine deaminase]; ADAM10 [ADAM metallopeptidase domain 10]; ADAM12 [ADAM metallopeptidase domain 12]; ADAM17 [ADAM metallopeptidase domain 17]; ADAM23 [ADAM metallopeptidase domain 23]; ADAM33 [ADAM metallopeptidase domain 33]; ADAM8 [ADAM metallopeptidase domain 8]; ADAM9 [ADAM metallopeptidase domain 9 (meltrin gamma)]; ADAMTS1 [ADAM metallopeptidase with thrombospondin type 1 motif, 1]; ADAMTS12 [ADAM metallopeptidase with thrombospondin type 1 motif, 12]; ADAMTS13 [ADAM metallopeptidase with thrombospondin type 1 motif, 13]; ADAMTS15 [ADAM metallopeptidase with thrombospondin type 1 motif, 15]; ADAMTSL1 [ADAMTS-like 1]; ADAMTSL4 [ADAMTS-like 4]; ADAR [adenosine deaminase, RNA-specific]; ADCY1 [adenylate cyclase 1 (brain)]; ADCY10 [adenylate cyclase 10 (soluble)]; ADCY3 [adenylate cyclase 3]; ADCY9 [adenylate cyclase 9]; ADCYAP1 [adenylate cyclase activating polypeptide 1 (pituitary)]; ADCYAP1R1 [adenylate cyclase activating polypeptide 1 (pituitary) receptor type 1]; ADD1 [adducin 1 (alpha)]; ADH5 [alcohol dehydrogenase 5 (class III), chi polypeptide]; ADIPOQ [adiponectin, C1Q and collagen domain containing]; ADIPOR1 [adiponectin receptor 1]; ADK [adenosine kinase]; ADM [adrenomedullin]; ADORA1 [adenosine A1 receptor]; ADORA2A [adenosine A2a receptor]; ADORA2B [adenosine A2b receptor]; ADORA3 [adenosine A3 receptor]; ADRA1B [adrenergic, alpha-1B-, receptor]; ADRA2A [adrenergic, alpha-2A-, receptor]; ADRA2B [adrenergic, alpha-2B-, receptor]; ADRB1 [adrenergic, beta-1-, receptor]; ADRB2 [adrenergic, beta-2-, receptor, surface]; ADSL [adenylosuccinate lyase]; ADSS [adenylosuccinate synthase]; AEBP1 [AE binding protein 1]; AFP [alpha-fetoprotein]; AGER [advanced glycosylation end product-specific receptor]; AGMAT [agmatine ureohydrolase (agmatinase)]; AGPS [alkylglycerone phosphate synthase]; AGRN [agrin]; AGRP [agouti related protein homolog (mouse)]; AGT [angiotensinogen (serpin peptidase inhibitor, clade A, member 8)]; AGTR1 [angiotensin II receptor, type 1]; AGTR2 [angiotensin II receptor, type 2]; AHOY [adenosylhomocysteinase]; AH11 [Abelson helper integration site 1]; AHR [aryl hydrocarbon receptor]; AHSP [alpha hemoglobin stabilizing protein]; AICDA [activation-induced cytidine deaminase]; AIDA [axin interactor, dorsalization associated]; AIMP1 [aminoacyl tRNA synthetase complex-interacting multifunctional protein 1]; AIRE [autoimmune regulator]; AK1 [adenylate kinase 1]; AK2 [adenylate kinase 2]; AKR1A1 [aldo-keto reductase family 1, member A1 (aldehyde reductase)]; AKRB11 [aldo-keto reductase family 1, member B1 (aldose reductase)]; AKR1C3 [aldo-keto reductase family 1, member C3 (3-alpha hydroxysteroid dehydrogenase, type II)]; AKT1 [v-akt murine thymoma viral oncogene homolog 1]; AKT2 [v-akt murine thymoma viral oncogene homolog 2]; AKT3 [v-akt murine thymoma viral oncogene homolog 3 (protein kinase B, gamma)]; ALB [albumin]; ALCAM [activated leukocyte cell adhesion molecule]; ALDH1A1 [aldehyde dehydrogenase 1 family, member A1]; ALDH2 [aldehyde dehydrogenase 2 family (mitochondrial)]; ALDH3A1 [aldehyde dehydrogenase 3 family, memberA1]; ALDH7A1 [aldehyde dehydrogenase 7 family, member A1]; ALDH9A1 [aldehyde dehydrogenase 9 family, member A1]; ALG1 [asparagine-linked glycosylation 1, beta-1,4-mannosyltransferase homolog (S. cerevisiae)]; ALG12 [asparagine-linked glycosylation 12, alpha-1,6-mannosyltransferase homolog (S. cerevisiae)]; ALK [anaplastic lymphoma receptor tyrosine kinase]; ALOX12 [arachidonate 12-lipoxygenase]; ALOX15 [arachidonate 15-lipoxygenase]; ALOX15B [arachidonate 15-lipoxygenase, type B]; ALOX5 [arachidonate 5-lipoxygenase]; ALOX5AP [arachidonate 5-lipoxygenase-activating protein]; ALP [alkaline phosphatase, intestinal]; ALPL [alkaline phosphatase, liver/bone/kidney]; ALPP [alkaline phosphatase, placental (Regan isozyme)]; AMACR [alpha-methylacyl-CoA racemase]; AMBP [alpha-1-microglobulin/bikunin precursor]; AMPD3 [adenosine monophosphate deaminase 3]; ANG [angiogenin, ribonuclease, RNase A family, 5]; ANGPT1 [angiopoietin 1]; ANGPT2 [angiopoietin 2]; ANK1 [ankyrin 1, erythrocytic]; ANKH [ankylosis, progressive homolog (mouse)]; ANKRD1 [ankyrin repeat domain 1 (cardiac muscle)]; ANPEP [alanyl (membrane) aminopeptidase]; ANTXR2 [anthrax toxin receptor 2]; ANXA1 [annexin A1]; ANXA2 [annexin A2]; ANXA5 [annexin A5]; ANXA6 [annexin A6]; AOAH [acyloxyacyl hydrolase (neutrophil)]; AOC2 [amine oxidase, copper containing 2 (retina-specific)]; AP2B1 [adaptor-related protein complex 2, beta 1 subunit]; AP3B1 [adaptor-related protein complex 3, beta 1 subunit]; APC [adenomatous polyposis coli]; APCS [amyloid P component, serum]; APEX1 [APEX nuclease (multifunctional DNA repair enzyme) 1]; APLNR [apelin receptor]; APOA1 [apolipoprotein A-1]; APOA2 [apolipoprotein A-II]; APOA4 [apolipoprotein A-IV]; APOB [apolipoprotein B (including Ag(x) antigen)]; APOBEC1 [apolipoprotein B mRNA editing enzyme, catalytic polypeptide 1]; APOBEC3G [apolipoprotein B mRNA editing enzyme, catalytic polypeptide-like 3G]; APOC3 [apolipoprotein C-III]; APOD [apolipoprotein D]; APOE [apolipoprotein E]; APOH [apolipoprotein H (beta-2-glycoprotein I)]; APP [amyloid beta (A4) precursor protein]; APRT [adenine phosphoribosyltransferase]; APTX [aprataxin]; AQP1 [aquaporin 1 (Colton blood group)]; AQP2 [aquaporin 2 (collecting duct)]; AQP3 [aquaporin 3 (Gill blood group)]; AQP4 [aquaporin 4]; AQP5 [aquaporin 5]; AQP7 [aquaporin 7]; AQP8 [aquaporin 8]; AR [androgen receptor]; AREG [amphiregulin]; ARF6 [ADP-ribosylation factor 6]; ARG1 [arginase, liver]; ARG2 [arginase, type 11]; ARHGAP6 [Rho GTPase activating protein 6]; ARHGEF2 [Rho/Rae guanine nucleotide exchange factor (GEF) 2]; ARHGEF6 [Rac/Cdc42 guanine nucleotide exchange factor (GEF) 6]; ARL13B [ADP-ribosylation factor-like 13B]; ARNT [aryl hydrocarbon receptor nuclear translocator]; ARNTL [aryl hydrocarbon receptor nuclear translocator-like]; ARRB1 [arrestin, beta 1]; ARRB2 [arrestin, beta 2]; ARSA [arylsulfatase A]; ARSB [arylsulfatase B]; ARSH [arylsulfatase family, member H]; ART1 [ADP-ribosyltransferase 1]; ASAH1 [N-acylsphingosine amidohydrolase (acid ceramidase) 1]; ASAP1 [ArfGAP with SH3 domain, ankyrin repeat and PH domain 1]; ASGR2 [asialoglycoprotein receptor 2]; ASL [argininosuccinate lyase]; ASNS [asparagine synthetase]; ASPA [aspartoacylase (Canavan disease)]; ASPG [asparaginase homolog (S. cerevisiae)]; ASPH [aspartate beta-hydroxylase]; ASRGL1 [asparaginase like 1]; ASS1 [argininosuccinate synthase 1]; ATF1 [activating transcription factor 1]; ATF2 [activating transcription factor 2]; ATF3 [activating transcription factor 3]; ATF4 [activating transcription factor 4 (tax-responsive enhancer element B67)]; ATG16L1 [ATG16 autophagy related 16-like 1 (S. cerevisiae)]; ATM [ataxia telangiectasia mutated]; ATMIN [ATM interactor]; ATN1 [atrophin 1]; ATOH1 [atonal homolog 1 (Drosophila)]; ATP2A2 [ATPase, Ca++ transporting, cardiac muscle, slow twitch 2]; ATP2A3 [ATPase, Ca++ transporting, ubiquitous]; ATP2C1 [ATPase, Ca++ transporting, type 2C, member 1]; ATP5E [ATP synthase, H+ transporting, mitochondrial F1 complex, epsilon subunit]; ATP7B [ATPase, Cu++ transporting, beta polypeptide]; ATP8B1 [ATPase, class 1, type 8B, member 1]; ATPAF2 [ATP synthase mitochondrial F1 complex assembly factor 2]; ATR [ataxia telangiectasia and Rad3 related]; ATRIP [ATR interacting protein]; ATRN [attractin]; AURKA [aurora kinase A]; AURKB [aurora kinase B]; AURKC [aurora kinase C]; AVP [arginine vasopressin]; AVPR2 [arginine vasopressin receptor 2]; AXL [AXL receptor tyrosine kinase]; AZGP 1 [alpha-2-glycoprotein 1, zinc-binding]; B2M [beta-2-microglobulin]; B3GALTL [beta 1,3-galactosyltransferase-like]; B3GAT1 [beta-1,3-glucuronyltransferase 1 (glucuronosyltransferase P)]; B4GALNT1 [beta-1,4-N-acetyl-galactosaminyl transferase 1]; B4GALT1 [UDP-Gal:betaGlcNAc beta 1,4-galactosyltransferase, polypeptide 1]; BACE1 [beta-site APP-cleaving enzyme 1]; BACE2 [beta-site APP-cleaving enzyme 2]; BACH1 [BTB and CNC homology 1, basic leucine zipper transcription factor 1]; BAD [BCL2-associated agonist of cell death]; BAIAP2 [BAI1-associated protein 2]; BAK1 [BCL2-antagonist/killer 1]; BARX2 [BARX homeobox 2]; BAT1 [HLA-B associated transcript 1]; BAT2 [HLA-B associated transcript 2]; BAX [BCL2-associated X protein]; BBC3 [BCL2 binding component 3]; BCAR1 [breast cancer anti-estrogen resistance 1]; BCAT1 [branched chain aminotransferase 1, cytosolic]; BCAT2 [branched chain aminotransferase 2, mitochondrial]; BCHE [butyrylcholinesterase]; BCL10 [B-cell CLL/lymphoma 10]; BCL1B [B-cell CLL/lymphoma 11B (zinc finger protein)]; BCL2 [B-cell CLL/lymphoma 2]; BCL2A1 [BCL2-related protein A1]; BCL2L1 [BCL2-like 1]; BCL2L11 [BCL2-like 11 (apoptosis facilitator)]; BCL3 [B-cell CLL/lymphoma 3]; BCL6 [B-cell CLL/lymphoma 6]; BCR [breakpoint cluster region]; BDKRB1 [bradykinin receptor B1]; BDKRB2 [bradykinin receptor B2]; BDNF [brain-derived neurotrophic factor]; BECN1 [beclin 1, autophagy related]; BEST1 [bestrophin 1]; BFAR [bifunctional apoptosis regulator]; BGLAP [bone gamma-carboxyglutamate (gla) protein]; BHMT [betaine-homocysteine methyltransferase]; BID [BH3 interacting domain death agonist]; BIK [BCL2-interacting killer (apoptosis-inducing)]; BIRC2 [baculoviral IAP repeat-containing 2]; BIRC3 [baculoviral IAP repeat-containing 3]; BIRC5 [baculoviral IAP repeat-containing 5]; BLK [B lymphoid tyrosine kinase]; BLM [Bloom syndrome, RecQ helicase-like]; BLNK [B-celllinker]; BLVRB [biliverdin reductase B (flavin reductase (NADPH))J; BMI1 [BMI1 polycomb ring finger oncogene]; BMP1 [bone morphogenetic protein 1]; BMP2 [bone morphogenetic protein 2]; BMP4 [bone morphogenetic protein 4]; BMP6 [bone morphogenetic protein 6]; BMP7 [bone morphogenetic protein 7]; BMPR1A [bone morphogenetic protein receptor, type IA]; BMPR1B [bone morphogenetic protein receptor, type IB]; BMPR2 [bone morphogenetic protein receptor, type II(serine/threonine kinase)]; BPI [bactericidal/permeability-increasing protein]; BRCA1 [breast cancer 1, early onset]; BRCA2 [breast cancer 2, early onset]; BRCC3 [BRCA1/BRCA2-containing complex, subunit 3]; BRD8 [bromodomain containing 8]; BRIP1 [BRCA1 interacting protein C-terminal helicase 1]; BSG [basigin (Ok blood group)]; BSN [bassoon (presynaptic cytomatrix protein)]; BSX [brain-specific homeobox]; BTD [biotinidase]; BTK [Bruton agammaglobulinemia tyrosine kinase]; BTLA [B and T lymphocyte associated]; BTNL2 [butyrophilin-like 2 (MHC class II associated)]; BTRC [beta-transducin repeat containing]; C10orf67 [chromosome 10 open reading frame 67]; C11orf30 [chromosome 11 open reading frame 30]; C11orf58 [chromosome 11 open reading frame 58]; C13orf23 [chromosome 13 open reading frame 23]; C13orf31 [chromosome 13 open reading frame 31]; C15orf2 [chromosome 15 open reading frame 2]; (16orf75 [chromosome 16 open reading frame 75]; C19orf10 [chromosome 19 open reading frame 10]; CQA [complement component 1, q subcomponent, A chain]; C1QB [complement component 1, q subcomponent, B chain]; C1QC [complement component 1, q subcomponent, C chain]; C1QTNF5 [C1 q and tumor necrosis factor related protein 5]; C1R [complement component 1, r subcomponent]; C1S [complement component 1, s subcomponent]; C2 [complement component 2]; C20orf29 [chromosome 20 open reading frame 29]; C21orf33 [chromosome 21 open reading frame 33]; C3 [complement component 3]; C3AR1 [complement component 3a receptor 1]; C3orf27 [chromosome 3 open reading frame 27]; C4A [complement component 4A (Rodgers blood group)]; C4B [complement component 4B (Chido blood group)]; C4BPA [complement component 4 binding protein, alpha]; C4BPB [complement component 4 binding protein, beta]; C5 [complement component 5]; C5AR1 [complement component 5a receptor 1]; C5orf56 [chromosome 5 open reading frame 56]; C5orf62 [chromosome 5 open reading frame 62]; C6 [complement component 6]; C6orf142 [chromosome 6 open reading frame 142]; C6orf25 [chromosome 6 open reading frame 25]; C7 [complement component 7]; C7orf72 [chromosome 7 open reading frame 72]; C8A [complement component 8, alpha polypeptide]; C8B [complement component 8, beta polypeptide]; C8G [complement component 8, gamma polypeptide]; C8orf38 [chromosome 8 open reading frame 38]; C9 [complement component 9]; CA2 [carbonic anhydrase II]; CA6 [carbonic anhydrase VI]; CA8 [carbonic anhydrase VIII]; CA9 [carbonic anhydrase IX]; CABIN1 [calcineurin binding protein 1]; CACNA1C [calcium channel, voltage-dependent, L type, alpha 1C subunit]; CACNA1S [calcium channel, voltage-dependent. L type, alpha 1S subunit]; CAD [carbamoyl-phosphate synthetase 2, aspartate transcarbamylase, and dihydroorotase]; CALB1 [calbindin 1, 28 kDa]; CALB2 [calbindin 2]; CALCA [calcitonin-related polypeptide alpha]; CALCRL [calcitonin receptor-like]; CALD 1 [caldesmon 1]; CALM1 [calmodulin 1 (phosphorylase kinase, delta)]; CALM2 [calmodulin 2 (phosphorylase kinase, delta)]; CALM3 [calmodulin 3 (phosphorylase kinase, delta)]; CALR [calreticulin]; CAMK2G [calcium/calmodulin-dependent protein kinase II gamma]; CAMP [cathelicidin antimicrobial peptide]; CANT1 [calcium activated nucleotidase 1]; CANX [calnexin]; CAPN1 [calpain 1, (mull) large subunit]; CARD10 [caspase recruitment domain family, member 10]; CARD16 [caspase recruitment domain family, member 16]; CARDS [caspase recruitment domain family, member 8]; CARDS [caspase recruitment domain family, member 9]; CASP1 [caspase 1, apoptosis-related cysteine peptidase (interleukin 1, beta, convertase)]; CASP10 [caspase 10, apoptosis-related cysteine peptidase]; CASP2 [caspase 2, apoptosis-related cysteine peptidase]; CASP3 [caspase 3, apoptosis-related cysteine peptidase]; CASP5 [caspase 5, apoptosis-related cysteine peptidase]; CASP6 [caspase 6, apoptosis-related cysteine peptidase]; CASP7 [caspase 7, apoptosis-related cysteine peptidase]; CASP8 [caspase 8, apoptosis-related cysteine peptidase]; CASP8AP2 [caspase 8 associated protein 2]; CASP9 [caspase 9, apoptosis-related cysteine peptidase]; CASR [calcium-sensing receptor]; CAST [calpastatin]; CAT [catalase]; CAV1 [caveolin 1, caveolae protein, 22 kDa]; CAV2 [caveolin 2]; CBL [Cas-Br-M (murine) ecotropic retroviral transforming sequence]; CBS [cystathionine-beta-synthase]; CBX5 [chromobox homolog 5 (HP1 alpha homolog, Drosophila)]; CC2D2A [coiled-coil and C2 domain containing 2A]; CCBP2 [chemokine binding protein 2]; CCDC144A [coiled-coil domain containing 144A]; CCDC144B [coiled-coil domain containing 144B]; CCDC68 [coiled-coil domain containing 68]; CCK [cholecystokinin]; CCL1 [chemokine (C-C motif) ligand 1]; CCL11 [chemokine (C-C motif) ligand 11]; CCL13 [chemokine (C-C motif) ligand 13]; CCL14 [chemokine (C-C motif) ligand 14]; CCL17 [chemokine (C-C motif) ligand 17]; CCL18 [chemokine (C-C motif) ligand 18 (pulmonary and activation-regulated)]; CCL19 [chemokine (C-C motif) ligand 19]; CCL2 [chemokine (C-C motif) ligand 2]; CCL20 [chemokine (C-C motif) ligand 20]; CCL21 [chemokine (C-C motif) ligand 21]; CCL22 [chemokine (C-C motif) ligand 22]; CCL24 [chemokine (C-C motif) ligand 24]; CCL25 [chemokine (C-C motif) ligand 25]; CCL26 [chemokine (C-C motif) ligand 26]; CCL27 [chemokine (C-C motif) ligand 27]; CCL28 [chemokine (C-C motif) ligand 28]; CCL3 [chemokine (C-C motif) ligand 3]; CCL4 [chemokine (C-C motif) ligand 4]; CCL4L1 [chemokine (C-C motif) ligand 4-like 1]; CCL5 [chemokine (C-C motif) ligand 5]; CCL7 [chemokine (C-C motif) ligand 7]; CCL8 [chemokine (C-C motif) ligand 8]; CCNA1 [cyclin A1]; CCNA2 [cyclin A2]; CCNB1 [cyclin B1]; CCNB2 [cyclin B2]; CCNC [cyclin C]; CCND1 [cyclin D1]; CCND2 [cyclin D2]; CCND3 [cyclin D3]; CCNE1 [cyclin E1]; CCNG1 [cyclin G1]; CCNH [cyclin H]; CCNT1 [cyclin T1]; CCNT2 [cyclin T2]; CCNY [cyclin Y]; CCR1 [chemokine (C-C motif) receptor 1]; CCR2 [chemokine (C-C motif) receptor 2]; CCR3 [chemokine (C-C motif) receptor 3]; CCR4 [chemokine (C-C motif) receptor 4]; CCR5 [chemokine (C-C motif) receptor 5]; CCR6 [chemokine (C-C motif) receptor 6]; CCR7 [chemokine (C-C motif) receptor 7]; CCR8 [chemokine (C-C motif) receptor 8]; CCR9 [chemokine (C-C motif) receptor 9]; CCRL1 [chemokine (C-C motif) receptor-like 1]; CD14 [CD14 molecule]; CD151 [CD151 molecule (Raph blood group)]; CD160 [CD160 molecule]; CD163 [CD163 molecule]; CD180 [CD180 molecule]; CD19 [CD19 molecule]; CD1A [CD1a molecule]; CD1B [CD1b molecule]; CD1C [CD1c molecule]; CD1D [CD1d molecule]; CD2 [CD2 molecule]; CD200 [CD200 molecule]; CD207 [CD207 molecule, langerin]; CD209 [CD209 molecule]; CD22 [CD22 molecule]; CD226 [CD226 molecule]; CD24 [CD24 molecule]; CD244 [CD244 molecule, natural killer cell receptor 2B4]; CD247 [CD247 molecule]; CD27 [CD27 molecule]; CD274 [CD274 molecule]; CD28 [CD28 molecule]; CD2AP [CD2-associated protein]; CD300LF [CD300 molecule-like family member f]; CD34 [CD34 molecule]; CD36 [CD36 molecule (thrombospondin receptor)]; CD37 [CD37 molecule]; CD38 [CD38 molecule]; CD3E [CD3e molecule, epsilon (CD3-TCR complex)]; CD4 [CD4 molecule]; CD40 [CD40 molecule, TNF receptor superfamily member 5]; CD40LG [CD40 ligand]; CD44 [CD44 molecule (Indian blood group)]; CD46 [CD46 molecule, complement regulatory protein]; CD47 [CD47 molecule]; CD48 [CD48 molecule]; CD5 [CD5 molecule]; CD52 [CD52 molecule]; CD53 [CD53 molecule]; CD55 [CD55 molecule, decay accelerating factor for complement (Cromer blood group)]; CD58 [CD58 molecule]; CD59 [CD59 molecule, complement regulatory protein]; CD63 [CD63 molecule]; CD68 [CD68 molecule]; CD69 [CD69 molecule]; CD7 [CD7 molecule]; CD70 [CD70 molecule]; CD72 [CD72 molecule]; CD74 [CD74 molecule, major histocompatibility complex, class II invariant chain]; CD79A [CD79a molecule, immunoglobulin-associated alpha]; CD79B [CD79b molecule, immunoglobulin-associated beta]; CD80 [CD80 molecule]; CD81 [CD81 molecule]; CD82 [CD82 molecule]; CD83 [CD83 molecule]; CD86 [CD86 molecule]; CD8A [CD8a molecule]; CD9 [CD9 molecule]; CD93 [CD93 molecule]; CD97 [CD97 molecule]; CDC20 [cell division cycle 20 homolog (S. cerevisiae)]; CDC25A [cell division cycle 25 homolog A (S. pombe)]; CDC25B [cell division cycle 25 homolog B (S. pombe)]; CDC25C [cell division cycle 25 homolog C (S. pombe)]; CDC42 [cell division cycle 42 (GTP binding protein, 25 kDa)]; CDC45 [CDC45 cell division cycle 45 homolog (S. cerevisiae)]; CDC5L [CDC5 cell division cycle 5-like (S. pombe)]; CDC6 [cell division cycle 6 homolog (S. cerevisiae)]; CDC7 [cell division cycle 7 homolog (S. cerevisiae)]; CDH1 [cadherin 1, type 1, E-cadherin (epithelial)]; CDH2 [cadherin 2, type 1, N-cadherin (neuronal)]; CDH26 [cadherin 26]; CDH3 [cadherin 3, type 1, P-cadherin (placental)]; CDH5 [cadherin 5, type 2 (vascular endothelium)]; CD1PT [CDP-diacylglycerol-inositol 3-phosphatidyltransferase (phosphatidylinositol synthase)]; CDK1 [cyclin-dependent kinase 1]; CDK2 [cyclin-dependent kinase 2]; CDK4 [cyclin-dependent kinase 4]; CDKS [cyclin-dependent kinase 5]; CDKSR1 [cyclin-dependent kinase 5, regulatory subunit 1 (p³⁵)]; CDK7 [cyclin-dependent kinase 7]; CDK9 [cyclin-dependent kinase 9]; CDKAL1 [CDK5 regulatory subunit associated protein 1-like 1]; CDKN1A [cyclin-dependent kinase inhibitor 1A (p21, Cip1)]; CDKN1B [cyclin-dependentkinase inhibitor 1B (p27, Kip1)]; CDKN1C [cyclin-dependent kinase inhibitor 1C (p57, Kip2)]; CDKN2A [cyclin-dependent kinase inhibitor 2A (melanoma, p16, inhibits CDK4)]; CDKN2B [cyclin-dependent kinase inhibitor 2B (p15, inhibits CDK4)]; CDKN3 [cyclin-dependent kinase inhibitor 3]; CDR2 [cerebellar degeneration-related protein 2, 62 kDa]; CDT1 [chromatin licensing and DNA replication factor 1]; CDX2 [caudal type homeobox 2]; CEACAM1 [carcinoembryonic antigen-related cell adhesion molecule 1 (biliary glycoprotein)]; CEACAM3 [carcinoembryonic antigen-related cell adhesion molecule 3]; CEACAMS [carcinoembryonic antigen-related cell adhesion molecule 5]; CEACAM6 [carcinoembryonic antigen-related cell adhesion molecule 6 (non-specific cross reacting antigen)]; CEACAM7 [carcinoembryonic antigen-related cell adhesion molecule 7]; CEBPB [CCAAT/enhancer binding protein (C/EBP), beta]; CEL [carboxyl ester lipase (bile salt-stimulated lipase)]; CENPJ [centromere protein J]; CENPV [centromere protein V]; CEP290 [centrosomal protein 290 kDa]; CERK [ceramide kinase]; CETP [cholesteryl ester transfer protein, plasma]; CFB [complement factor B]; CFD [complement factor D (adipsin)]; CFDP1 [craniofacial development protein 1]; CFH [complement factor H]; CFHR1 [complement factor H-related 1]; CFHR3 [complement factor H-related 3]; CF1 [complement factor I]; CFL1 [cofilin 1 (non-muscle)]; CFL2 [cofilin 2 (muscle)]; CFLAR [CASP8 and FADD-like apoptosis regulator]; CFP [complement factor properdin]; CFTR [cystic fibrosis transmembrane conductance regulator (ATP-binding cassette sub-family C, member 7)]; CGA [glycoprotein hormones, alpha polypeptide]; CGB [chorionic gonadotropin, beta polypeptide]; CGB5 [chorionic gonadotropin, beta polypeptide 5]; CHAD [chondroadherin]; CHAF1A [chromatin assembly factor 1, subunit A (p150)]; CHAF1B [chromatin assembly factor 1, subunit B (p60)]; CHAT [choline acetyltransferase]; CHD2 [chromodomain helicase DNA binding protein 2]; CHD7 [chromodomain helicase DNA binding protein 7]; CHEK1 [CHK1 checkpoint homolog (S. pombe)]; CHEK2 [CHK2 checkpoint homolog (S. pombe)]; CHGA [chromogranin A (parathyroid secretory protein 1)]; CHGB [chromogranin B (secretogranin 1)]; CHI3L1 [chitinase 3-like 1 (cartilage glycoprotein-39)]; CH1A [chitinase, acidic]; CHIT1 [chitinase 1 (chitotriosidase)]; CHKA [choline kinase alpha]; CHML [choroideremia-like (Rab escort protein 2)]; CHRD [chordin]; CHRDL1 [chordin-like 1]; CHRM1 [cholinergic receptor, muscarinic 1]; CHRM2 [cholinergic receptor, muscarinic 2]; CHRM3 [cholinergic receptor, muscarinic 3]; CHRNA3 [cholinergic receptor, nicotinic, alpha 3]; CHRNA4 [cholinergic receptor, nicotinic, alpha 4]; CHRNA7 [cholinergic receptor, nicotinic, alpha 7]; CHUK [conserved helix-loop-helix ubiquitous kinase]; CIB1 [calcium and integrin binding 1 (calmyrin)]; CIITA [class II, major histocompatibility complex, transactivator]; CILP [cartilage intermediate layer protein, nucleotide pyrophosphohydrolase]; CISH [cytokine inducible SH2-containing protein]; CKB [creatine kinase, brain]; CKLF [chemokine-like factor]; CKM [creatine kinase, muscle]; CLC [Charcot-Leyden crystal protein]; CLCA1 [chloride channel accessory 1]; CLCN1 [chloride channel 1, skeletal muscle]; CLCN3 [chloride channel 3]; CLDN1 [claudin 1]; CLDN11 [claudin 11]; CLDN14 [claudin 14]; CLDN16 [claudin 16]; CLDN19 [claudin 19]; CLDN2 [claudin 2]; CLDN3 [claudin 3]; CLDN4 [claudin 4]; CLDN5 [claudin 5]; CLDN7 [claudin 7]; CLDN8 [claudin 8]; CLEC12A [C-type lectin domain family 12, member A]; CLEC16A [C-type lectin domain family 16, member A]; CLEC4A [C-type lectin domain family 4, member A]; CLEC4D [C-type lectin domain family 4, member D]; CLEC4M [C-type lectin domain family 4, member M]; CLEC7A [C-type lectin domain family 7, member A]; CLIP2 [CAP-GLY domain containing linker protein 2]; CLK2 [CDC-like kinase 2]; CLSPN [claspin homolog (Xenopus laevis)]; CLSTN2 [calsyntenin 2]; CLTCL1 [clathrin, heavy chain-like 1]; CLU [clusterin]; CMA1 [chymase 1, mast cell]; CMKLR1 [chemokine-like receptor 1]; CNBP [CCHC-type zinc finger, nucleic acid binding protein]; CNDP2 [CNDP dipeptidase 2 (metallopeptidase M20 family)]; CNN1 [calponin 1, basic, smooth muscle]; CNP [2′,3′-cyclic nucleotide 3′ phosphodiesterase]; CNR1 [cannabinoid receptor 1 (brain)]; CNR2 [cannabinoid receptor 2 (macrophage)]; CNTF [ciliary neurotrophic factor]; CNTN2 [contactin 2 (axonal)]; COG1 [component of oligomeric golgi complex 1]; COG2 [component of oligomeric golgi complex 2]; COIL [coilin]; COL11A1 [collagen, type XI, alpha 1]; COL11A2 [collagen, type XI, alpha 2]; COL17A1 [collagen, type XVII, alpha 1]; COL18A1 [collagen, type XVIII, alpha 1]; COLA1 [collagen, type 1, alpha 1]; COL1A2 [collagen, type 1, alpha 2]; COL2A1 [collagen, type II, alpha 1]; COL3A1 [collagen, type III, alpha 1]; COL4A1 [collagen, type IV, alpha 1]; COL4A3 [collagen, type IV, alpha 3 (Goodpasture antigen)]; COL4A4 [collagen, type IV, alpha 4]; COL4A5 [collagen, type IV, alpha 5]; COL4A6 [collagen, type IV, alpha 6]; COL5A1 [collagen, type V, alpha 1]; COL5A2 [collagen, type V, alpha 2]; COL6A1 [collagen, type VI, alpha 1]; COL6A2 [collagen, type VI, alpha 2]; COL6A3 [collagen, type VI, alpha 3]; COL7A1 [collagen, type VII, alpha 1]; COL8A2 [collagen, type VIII, alpha 2]; COL9A1 [collagen, type IX, alpha 1]; COMT [catechol-O-methyltransferase]; COQ3 [coenzyme Q3 homolog, methyltransferase (S. cerevisiae)]; COQ7 [coenzyme Q7 homolog, ubiquinone (yeast)]; CORO1A [coronin, actin binding protein, IA]; COX10 [COX10 homolog, cytochrome c oxidase assembly protein, heme A: famesyltransferase (yeast)]; COX15 [COX15 homolog, cytochrome c oxidase assembly protein (yeast)]; COX5A [cytochrome c oxidase subunit Va]; COX8A [cytochrome c oxidase subunit VIIIA (ubiquitous)]; CP [ceruloplasmin (ferroxidase)]; CPA1 [carboxypeptidase A1 (pancreatic)]; CPB2 [carboxypeptidase B2 (plasma)]; CPN1 [carboxypeptidase N, polypeptide 1]; CPOX [coproporphyrinogen oxidase]; CPS1 [carbamoyl-phosphate synthetase 1, mitochondrial]; CPT2 [camitine palmitoyltransferase 2]; CR1 [complement component (3b/4b) receptor 1 (Knops blood group)]; CR2 [complement component (3d/Epstein Barr virus) receptor 2]; CRAT [carnitine O-acetyltransferase]; CRB1 [crumbs homolog 1 (Drosophila)]; CREB1 [cAMP responsive element binding protein 1]; CREBBP [CREB binding protein]; CREM [cAMP responsive element modulator]; CRH [corticotropin releasing hormone]; CRHR1 [emiicotropin releasing hormone receptor 1]; CRHR2 [corticotropin releasing hormone receptor 2]; CRK [v-crk sarcoma virus CT10 oncogene homolog (avian)]; CRKL [v-crk sarcoma virus CT10 oncogene homolog (avian)-like]; CRLF2 [cytokine receptor-like factor 2]; CRLF3 [cytokine receptor-like factor 3]; CROT [carnitine O-octanoyltransferase]; CRP [C-reactive protein, pentraxin-related]; CRX [cone-rod homeobox]; CRY2 [cryptochrome 2 (photolyase-like)]; CRYAA [crystallin, alpha A]; CRYAB [crystallin, alpha B]; CS [citrate synthase]; CSF1 [colony stimulating factor 1 (macrophage)]; CSF1R [colony stimulating factor 1 receptor]; CSF2 [colony stimulating factor 2 (granulocyte-macrophage)]; CSF2RB [colony stimulating factor 2 receptor, beta, low-affinity (granulocyte-macrophage)]; CSF3 [colony stimulating factor 3 (granulocyte)]; CSF3R [colony stimulating factor 3 receptor (granulocyte)]; CSK [c-src tyrosine kinase]; CSMD3 [CUB and Sushi multiple domains 3]; CSN1S1 [casein alpha s1]; CSN2 [casein beta]; CSNK1A1 [casein kinase 1, alpha 1]; CSNK2A1 [casein kinase 2, alpha 1 polypeptide]; CSNK2B [casein kinase 2, beta polypeptide]; CSPG4 [chondroitin sulfate proteoglycan 4]; CST3 [cystatin C]; CST8 [cystatin 8 (cystatin-related epididymal specific)]; CSTA [cystatin A (stefin A)]; CSTB [cystatin B (stefin B)]; CTAGE1 [cutaneous T-celllymphoma-associated antigen 1]; CTF1 [cardiotrophin 1]; CTGF [connective tissue growth factor]; CTH [cystathionase (cystathionine gamma-lyase)]; CTLA4 [cytotoxic T-lymphocyte-associated protein 4]; CTNNA1 [catenin (cadherin-associated protein), alpha 1, 102 kDa]; CTNNA3 [catenin (cadherin-associated protein), alpha 3]; CTNNAL1 [catenin (cadherin-associated protein), alpha-like 1]; CTNNB1 [catenin (cadherin-associated protein), beta 1, 88 kDa]; CTNND1 [catenin (cadherin-associated protein), delta 1]; CTNS [cystinosis, nephropathic]; CTRL [chymotrypsin-like]; CTSB [cathepsin B]; CTSC [cathepsin C]; CTSD [cathepsin D]; CTSE [cathepsin E]; CTSG [cathepsin G]; CTSH [cathepsin H]; CTSK [cathepsin K]; CTSL1 [cathepsin L1]; CTTN [cortactin]; CUL1 [cullin 1]; CUL2 [cullin 2]; CUL4A [cullin 4A]; CULS [cullin 5]; CX3CL1 [chemokine (C-X3-C motif) ligand 1]; CX3CR1 [chemokine (C-X3-C motif) receptor 1]; CXADR [coxsackie virus and adenovirus receptor]; CXCL1 [chemokine (C-X-C motif) ligand 1 (melanoma growth stimulating activity, alpha)]; CXCL10 [chemokine (C-X-C motif) ligand 10]; CXCL11 [chemokine (C-X-C motif) ligand 11]; CXCL12 [chemokine (C-X-C motif) ligand 12 (stromal cell-derived factor 1)]; CXCL13 [chemokine (C-X-C motif) ligand 13]; CXCL2 [chemokine (C-X-C motif) ligand 2]; CXCL5 [chemokine (C-X-C motif) ligand 5]; CXCL6 [chemokine (C-X-C motif) ligand 6 (granulocyte chemotactic protein 2)]; CXCL9 [chemokine (C-X-C motif) ligand 9]; CXCR1 [chemokine (C-X-C motif) receptor 1]; CXCR2 [chemokine (C-X-C motif) receptor 2]; CXCR3 [chemokine (C-X-C motif) receptor 3]; CXCR4 [chemokine (C-X-C motif) receptor 4]; CXCR5 [chemokine (C-X-C motif) receptor 5]; CXCR6 [chemokine (C-X-C motif) receptor 6]; CXCR7 [chemokine (C-X-C motif) receptor 7]; CXorf40A [chromosome X open reading frame 40A]; CYB5A [cytochrome b5 type A (microsomal)]; CYB5R3 [cytochrome b5 reductase 3]; CYBA [cytochrome b-245, alpha polypeptide]; CYBB [cytochrome b-245, beta polypeptide]; CYC1 [cytochrome c-1]; CYCS [cytochrome c, somatic]; CYFIP2 [cytoplasmic FMR1 interacting protein 2]; CYP11A1 [cytochrome P450, family 11, subfamily A, polypeptide 1]; CYP11B1 [cytochrome P450, family 11, subfamily B, polypeptide 1]; CYP11B2 [cytochrome P450, family 11, subfamily B, polypeptide 2]; CYP17A [cytochrome P450, family 17, subfamily A, polypeptide 1]; CYP19A1 [cytochrome P450, family 19, subfamily A, polypeptide 1]; CYP1A1 [cytochrome P450, family 1, subfamily A, polypeptide 1]; CYP1A2 [cytochrome P450, family 1, subfamily A, polypeptide 2]; CYP1B1 [cytochrome P450, family 1, subfamily B, polypeptide 1]; CYP21A2 [cytochrome P450, family 21, subfamily A, polypeptide 2]; CYP24A1 [cytochrome P450, family 24, subfamily A, polypeptide 1]; CYP27A1 [cytochrome P450, family 27, subfamily A, polypeptide 1]; CYP27B1 [cytochrome P450, family 27, subfamily B, polypeptide 1]; CYP2A6 [cytochrome P450, family 2, subfamily A, polypeptide 6]; CYP2B6 [cytochrome P450, family 2, subfamily B, polypeptide 6]; CYP2C19 [cytochrome P450, family 2, subfamily C, polypeptide 19]; CYP2C8 [cytochrome P450, family 2, subfamily C, polypeptide 8]; CYP2C9 [cytochrome P450, family 2, subfamily C, polypeptide 9]; CYP2D6 [cytochrome P450, family 2, subfamily D, polypeptide 6]; CYP2E1 [cytochrome P450, family 2, subfamily E, polypeptide 1]; CYP2J2 [cytochrome P450, family 2, subfamily J, polypeptide 2]; CYP2R1 [cytochrome P450, family 2, subfamily R, polypeptide 1]; CYP3A4 [cytochrome P450, family 3, subfamily A, polypeptide 4]; CYP3A5 [cytochrome P450, family 3, subfamily A, polypeptide 5]; CYP4F3 [cytochrome P450, family 4, subfamily F, polypeptide 3]; CYP51A1 [cytochrome P450, family 51, subfamily A, polypeptide 1]; CYP7A1 [cytochrome P450, family 7, subfamily A, polypeptide 1]; CYR61 [cysteine-rich, angiogenic inducer, 61]; CYSLTR1 [cysteinyl leukotriene receptor 1]; CYSLTR2 [cysteinylleukotriene receptor 2]; DAO [D-amino-acid oxidase]; DAOA [D-amino acid oxidase activator]; DAP3 [death associated protein 3]; DAPK1 [death-associated protein kinase 1]; DARC [Duffy blood group, chemokine receptor]; DAZ1 [deleted in azoospermia 1]; DBH [dopamine beta-hydroxylase (dopamine beta-monooxygenase)]; DCK [deoxycytidine kinase]; DCLRE1C [DNA cross-link repair 1C (PS02 homolog, S. cerevisiae)]; DCN [decorin]; DCT [dopachrome tautomerase (dopachrome delta-isomerase, tyrosine-related protein 2)]; DCTN2 [dynactin 2 (p50)]; DDB1 [damage-specific DNA binding protein 1, 127 kDa]; DDB2 [damage-specific DNA binding protein 2, 48 kDa]; DDC [dopa decarboxylase (aromatic L-amino acid decarboxylase)]; DDIT3 [DNA-damage-inducible transcript 3]; DDR1 [discoidin domain receptor tyrosine kinase 1]; DDX1 [DEAD (Asp-Glu-Ala-Asp) (SEQ ID NO: 532) box polypeptide 1]; DDX41 [DEAD (Asp-Glu-Ala-Asp) (SEQ ID NO: 532) box polypeptide 41]; DDX42 [DEAD (Asp-Glu-Ala-Asp) (SEQ ID NO: 532) box polypeptide 42]; DDX58 [DEAD (Asp-Glu-Ala-Asp) (SEQ ID NO: 532) box polypeptide 58]; DEFA1 [defensin, alpha 1]; DEFAS [defensin, alpha 5, Paneth cell-specific]; DEFA6 [defensin, alpha 6, Paneth cell-specific]; DEFB1 [defensin, beta 1]; DEFB103B [defensin, beta 103B]; DEFB104A [defensin, beta 104A]; DEFB4A [defensin, beta 4A]; DEK [DEK oncogene]; DENND1B [DENN/MADD domain containing IB]; DES [desmin]; DGAT1 [diacylglycerol O-acyltransferase homolog 1 (mouse)]; DGCR14 [DiGeorge syndrome critical region gene 14]; DGCR2 [DiGeorge syndrome critical region gene 2]; DGCR6 [DiGeorge syndrome critical region gene 6]; DGCR6L [DiGeorge syndrome critical region gene 6-like]; DGCR8 [DiGeorge syndrome critical region gene 8]; DGUOK [deoxyguanosine kinase]; DHFR [dihydrofolate reductase]; DHODH [dihydroorotate dehydrogenase]; DHPS [deoxyhypusine synthase]; DHRS7B [dehydrogenase/reductase (SDR family) member 7B]; DHRS9 [dehydrogenase/reductase (SDR family) member 9]; DIAPH1 [diaphanous homolog 1 (Drosophila)]; DICER1 [dicer 1, ribonuclease type III]; DI02 [deiodinase, iodothyronine, type II]; DKC1 [dyskeratosis congenita 1, dyskerin]; DKK1 [dickkopf homolog 1 (Xenopus laevis)]; DLAT [dihydrolipoamide S-acetyltransferase]; DLG2 [discs, large homolog 2 (Drosophila)]; DLG5 [discs, large homolog 5 (Drosophila)]; DMBT1 [deleted in malignant brain tumors 1]; DMC1 [DMC1 dosage suppressor of mck1 homolog, meiosis-specific homologous recombination (yeast)]; DMD [dystrophin]; DMP1 [dentin matrix acidic phosphoprotein 1]; DMPK [dystrophia myotonica-protein kinase]; DMRT1 [doublesex and mab-3 related transcription factor 1]; DMXL2 [Dmx-like 2]; DNA2 [DNA replication helicase 2 homolog (yeast)]; DNAH1 [dynein, axonemal, heavy chain 1]; DNAH12 [dynein, axonemal, heavy chain 12]; DNAI1 [dynein, axonemal, intermediate chain 1]; DNAI2 [dynein, axonemal, intermediate chain 2]; DNASE1 [deoxyribonuclease I]; DNM2 [dynamin 2]; DNM3 [dynamin 3]; DNMT1 [DNA (cytosine-5-)-methyltransferase 1]; DNMT3B [DNA (cytosine-5-)-methyltransferase 3 beta]; DNTT [deoxynucleotidyltransferase, terminal]; DOCK1 [dedicator of cytokinesis 1]; DOCK3 [dedicator of cytokinesis 3]; DOCK8 [dedicator of cytokinesis 8]; DOK1 [docking protein 1, 62 kDa (downstream of tyrosine kinase 1)]; DOLK [dolichol kinase]; DPAGT1 [dolichyl-phosphate (UDP-N-acetylglucosamine) N-acetylglucosaminephosphotransferase 1 (GIcNAc-1-P transferase)]; DPEP1 [dipeptidase 1 (renal)]; DPH1 [DPH1 homolog (S. cerevisiae)]; DPM1 [dolichyl-phosphate mannosyltransferase polypeptide 1, catalytic subunit]; DPP10 [dipeptidyl-peptidase 10]; DPP4 [dipeptidyl-peptidase 4]; DPYD [dihydropyrimidine dehydrogenase]; DRD2 [dopamine receptor D2]; DRD3 [dopamine receptor D3]; DRD4 [dopamine receptor D4]; DSC2 [desmocollin 2]; DSG1 [desmoglein 1]; DSG2 [desmoglein 2]; DSG3 [desmoglein 3 (pemphigus vulgaris antigen)]; DSP [desmoplakin]; DTNA [dystrobrevin, alpha]; DTYMK [deoxythymidylate kinase (thymidylate kinase)]; DUOX1 [dual oxidase 1]; DUOX2 [dual oxidase 2]; DUSP1 [dual specificity phosphatase 1]; DUSP14 [dual specificity phosphatase 14]; DUSP2 [dual specificity phosphatase 2]; DUSP5 [dual specificity phosphatase 5]; DUT [deoxyuridine triphosphatase]; DVL1 [dishevelled, dsh homolog 1 (Drosophila)]; DYNC2H1 [dynein, cytoplasmic 2, heavy chain 1]; DYNLL1 [dynein, light chain, LC8-type 1]; DYRK1A [dual-specificity tyrosine-(Y)-phosphmylation regulated kinase IA]; DYSF [dysferlin, limb girdle muscular dystrophy 2B (autosomal recessive)]; E2F1 [E2F transcription factor 1]; EBF2 [early B-cell factor 2]; EB13 [Epstein-Barr virus induced 3]; ECE1 [endothelin converting enzyme 1]; ECM1 [extracellular matrix protein 1]; EDA [ectodysplasin A]; EDAR [ectodysplasin A receptor]; EDN1 [endothelin 1]; EDNRA [endothelin receptor type A]; EDNRB [endothelin receptor type B]; EEF1A1 [eukaryotic translation elongation factor 1 alpha 1]; EEF1A2 [eukaryotic translation elongation factor 1 alpha 2]; EFEMP2 [EGF-containing fibulin-like extracellular matrix protein 2]; EFNA1 [ephrin-A1]; EFNB2 [ephrin-B2]; EFS [embryonal Fyn-associated substrate]; EGF [epidermal growth factor (beta-urogastrone)]; EGFR [epidermal growth factor receptor (erythroblastic leukemia viral (v-erb-b) oncogene homolog, avian)]; EGR1 [early growth response 1]; EGR2 [early growth response 2]; EHF [ets homologous factor]; EHMT2 [euchromatic histone-lysine N-methyltransferase 2]; EIF2AK2 [eukaryotic translation initiation factor 2-alpha kinase 2]; EIF2S1 [eukaryotic translation initiation factor 2, subunit 1 alpha, 35 kDa]; EIF2S2 [eukaryotic translation initiation factor 2, subunit 2 beta, 38 kDa]; EIF3A [eukaryotic translation initiation factor 3, subunit A]; EIF4B [eukaryotic translation initiation factor 4B]; EIF4E [eukaryotic translation initiation factor 4E]; EIF4EBP1 [eukaryotic translation initiation factor 4E binding protein 1]; EIF4G1 [eukaryotic translation initiation factor 4 gamma, 1]; EIF6 [eukaryotic translation initiation factor 6]; ELAC2 [elaC homolog 2 (E. coli)]; ELANE [elastase, neutrophil expressed]; ELAVL1 [ELAV (embryonic lethal, abnormal vision, Drosophila)-like 1 (Hu antigen R)]; ELF3 [E74-like factor 3 (ets domain transcription factor, epithelial-specific)]; ELF5 [E74-like factor 5 (ets domain transcription factor)]; ELN [elastin]; ELOVL4 [elongation of very long chain fatty acids (FEN1/Elo2, SUR4/Elo3, yeast)-like 4]; EMD [emerin]; EMILIN1 [elastin microfibril interfacer 1]; EMR2 [egf-like module containing, mucin-like, hormone receptor-like 2]; EN2 [engrailed homeobox 2]; ENG [endoglin]; ENO1 [enolase 1, (alpha)]; ENO2 [enolase 2 (gamma, neuronal)]; ENO3 [enolase 3 (beta, muscle)]; ENPP2 [ectonucleotide pyrophosphatase/phosphodiesterase 2]; ENPP3 [ectonucleotide pyrophosphatase/phosphodiesterase 3]; ENTPD1 [ectonucleoside triphosphate diphosphohydrolase 1]; EP300 [E A binding protein p300]; EPAS1 [endothelial PAS domain protein 1]; EPB42 [erythrocyte membrane protein band 4.2]; EPCAM [epithelial cell adhesion molecule]; EPHA1 [EPH receptor A1]; EPHA2 [EPH receptor A2]; EPHB2 [EPH receptor B2]; EPHB4 [EPH receptor B4]; EPHB6 [EPH receptor B6]; EPHX1 [epoxide hydrolase 1, microsomal (xenobiotic)]; EPHX2 [epoxide hydrolase 2, cytoplasmic]; EPO [erythropoietin]; EPOR [erythropoietin receptor]; EPRS [glutamyl-prolyl-tRNA synthetase]; EPX [eosinophil peroxidase]; ERBB2 [v-erb-b2 erythroblastic leukemia viral oncogene homolog 2, neuro/glioblastoma derived oncogene homolog (avian)]; ER BB21P [erbb2 interacting protein]; ERBB3 [v-erb-b2 erythroblastic leukemia viral oncogene homolog 3 (avian)]; ERBB4 [v-erb-a erythroblastic leukemia viral oncogene homolog 4 (avian)]; ERCC1 [excision repair cross-complementing rodent repair deficiency, complementation group 1 (includes overlapping antisense sequence)]; ERCC2 [excision repair cross-complementing rodent repair deficiency, complementation group 2]; ERCC3 [excision repair cross-complementing rodent repair deficiency, complementation group 3 (xeroderma pigmentosum group B complementing)]; ERCC4 [excision repair cross-complementing rodent repair deficiency, complementation group 4]; ERCC5 [excision repair cross-complementing rodent repair deficiency, complementation group 5]; ERCC6 [excision repair cross-complementing rodent repair deficiency, complementation group 6]; ERCC6L [excision repair cross-complementing rodent repair deficiency, complementation group 6-like]; ERCC8 [excision repair cross-complementing rodent repair deficiency, complementation group 8]; ERO1LB [ERO1-like beta (S. cerevisiae)]; ERVK6 [endogenous retroviral sequence K, 6]; ERVWE1 [endogenous retroviral family W, env(C7), member 1]; ESD [esterase D/formylglutathione hydrolase]; ESR1 [estrogen receptor 1]; ESR2 [estrogen receptor 2 (ER beta)]; ESRRA [estrogen-related receptor alpha]; ESRRB [estrogen-related receptor beta]; ETS1 [v-ets erythroblastosis virus E26 oncogene homolog 1 (avian)]; ETS2 [v-ets erythroblastosis virus E26 oncogene homolog 2 (avian)]; EWSR1 [Ewing sarcoma breakpoint region 1]; EXO1 [exonuclease 1]; EYA1 [eyes absent homolog 1 (Drosophila)]; EZH2 [enhancer ofzeste homolog 2 (Drosophila)]; EZR [ezrin]; F10 [coagulation factor X]; F11 [coagulation factor XI]; F12 [coagulation factor XII (Hageman factor)]; F13A1 [coagulation factor XIII, A1 polypeptide]; F13B [coagulation factor XIII, B polypeptide]; F2 [coagulation factor II (thrombin)]; F2R [coagulation factor II (thrombin) receptor]; F2RL1 [coagulation factor II (thrombin) receptor-like 1]; F2RL3 [coagulation factor 11 (thrombin) receptor-like 3]; F3 [coagulation factor III (thromboplastin, tissue factor)]; F5 [coagulation factor V (proaccelerin, labile factor)]; F7 [coagulation factor VII (serum prothrombin conversion accelerator)]; F8 [coagulation factor VIII, procoagulant component]; F9 [coagulation factor IX]; FABP1 [fatty acid binding protein 1, liver]; FABP2 [fatty acid binding protein 2, intestinal]; FABP4 [fatty acid binding protein 4, adipocyte]; FADD [Fas (TNFRSF6)-associated via death domain]; FADS1 [fatty acid desaturase 1]; FADS2 [fatty acid desaturase 2]; FAF1 [Fas (TNFRSF6) associated factor 1]; FAH [fumarylacctoacctatc hydrolase (fumarylacctoacctasc)]; FAM189B [family with sequence similarity 189, member B]; FAM92B [family with sequence similarity 92, member B]; FANCA [Fanconi anemia, complementation group A]; FANCB [Fanconi anemia, complementation group B]; FANCC [Fanconi anemia, complementation group C]; FANCD2 [Fanconi anemia, complementation group D2]; FANCE [Fanconi anemia, complementation groupE]; FANCF [Fanconi anemia, complementation group F]; FANCG [Fanconi anemia, complementation group G]; FANG1 [Fanconi anemia, complementation group 1]; FANCL [Fanconi anemia, complementation group L]; FANCM [Fanconi anemia, complementation group M]; FANK1 [fibronectin type III and ankyrin repeat domains 1]; FAS [Fas (TNF receptor superfamily, member 6)]; FASLG [Fas ligand (TNF superfamily, member 6)]; FASN [fatty acid synthase]; FASTK [Pas-activated serineithreonine kinase]; FBLN5 [fibulin 5]; FBN1 [fibrillin 1]; FBP1 [fructose-1,6-bisphosphatase 1]; FBX032 [F-box protein 32]; FBXW7 [F-box and WD repeat domain containing 7]; FCAR [Fe fragment of IgA, receptor for]; FCER1A [Fc fragment of IgE, high affinity 1, receptor for; alpha polypeptide]; FCERIG [Fc fragment of IgE, high affinity I, receptor for; gamma polypeptide]; FCER2 [Fc fragment of IgE, low affinity II, receptor for (CD23)]; FCGR1A [Fc fragment of IgG, high affinity 1a, receptor (CD64)]; FCGR2A [Fc fragment of IgG, low affinity IIa, receptor (CD32)]; FCGR2B [Fc fragment of IgG, low affinity 11 b, receptor (CD32)]; FCGR3A [Fc fragment of IgG, low affinity IIIa, receptor (CD16a)]; FCGR3B [Fc fragment of IgG, low affinity IIIb, receptor (CD16b)]; FCN2 [ficolin (collagen/fibrinogen domain containing lectin) 2 (hucolin)]; FCN3 [ficolin (collagen/fibrinogen domain containing) 3 (Hakata antigen)]; FCRL3 [Fc receptor-like 3]; FCRL6 [Fc receptor-like 6]; FDFT1 [farnesyl-diphosphate farnesyltransferase 1]; FDPS [famesyl diphosphate synthase (farnesyl pyrophosphate synthetase, dimethylallyltranstransferase, geranyltranstransferase)]; FDX1 [ferredoxin 1]; FEN1 [flap structure-specific endonuclease 1]; FERMT1 [fermitin family homolog 1 (Drosophila)]; FERMT3 [fermitin family homolog 3 (Drosophila)]; FES [feline sarcoma oncogene]; FFAR2 [free fatty acid receptor 2]; FGA [fibrinogen alpha chain]; FGB [fibrinogen beta chain]; FGF1 [fibroblast growth factor 1 (acidic)]; FGF2 [fibroblast growth factor 2 (basic)]; FGF5 [fibroblast growth factor 5]; FGF7 [fibroblast growth factor 7 (keratinocyte growth factor)]; FGF8 [fibroblast growth factor 8 (androgen-induced)]; FGFBP2 [fibroblast growth factor binding protein 2]; FGFR1 [fibroblast growth factor receptor 1]; FGFR10P [FGFR1 oncogene partner]; FGFR2 [fibroblast growth factor receptor 2]; FGFR3 [fibroblast growth factor receptor 3]; FGFR4 [fibroblast growth factor receptor 4]; FGG [fibrinogen gamma chain]; FGR [Gardner-Rasheed feline sarcoma viral (v-fgr) oncogene homolog]; FHIT [fragile histidine triad gene]; FHL1 [four and a half LIM domains 1]; FHL2 [four and a half LIM domains 2]; FIBP [fibroblast growth factor (acidic) intracellular binding protein]; FIGF [c-fos induced growth factor (vascular endothelial growth factor D)]; FKBP1A [FK506 binding protein 1A, 12 kDa]; FKBP4 [FK506 binding protein 4, 59 kDa]; FKBP5 [FK506 binding protein 5]; FLCN [folliculin]; FLG [filaggrin]; FLG2 [filaggrin family member 2]; FLNA [filamin A, alpha]; FLNB [filamin B, beta]; FLT1 [fins-related tyrosine kinase 1 (vascular endothelial growth factor/vascular permeability factor receptor)]; FLT3 [fins-related tyrosine kinase 3]; FLT3LG [fins-related tyrosine kinase 3 ligand]; FLT4 [fms-related tyrosine kinase 4]; FMN1 [formin 1]; FMOD [fibromodulin]; FMR1 [fragile X mental retardation 1]; FN1 [fibronectin 1]; FOLH1 [folate hydrolase (prostate-specific membrane antigen) 1]; FOLR1 [folate receptor 1 (adult)]; FOS [FBJ murine osteosarcoma viral oncogene homolog]; FOXL2 [forkhead box L2]; FOXN1 [forkhead box N1]; FOXN2 [forkhead box N2]; FOXO3 [forkhead box 03]; FOXP3 [forkhead box P3]; FPGS [folylpolyglutamate synthase]; FPR1 [formyl peptide receptor 1]; FPR2 [formyl peptide receptor 2]; FRAS1 [Fraser syndrome 1]; FREM2 [FRAS1 related extracellular matrix protein 2]; FSCN1 [fascin homolog 1, actin-bundling protein (Strongylocentrotus purpuratus)]; FSHB [follicle stimulating hormone, beta polypeptide]; FSHR [follicle stimulating hormone receptor]; FST [follistatin]; FTCD [formiminotransferase cyclodeaminase]; FTH1 [ferritin, heavy polypeptide 1]; FTL [ferritin, light polypeptide]; FURIN [furin (paired basic amino acid cleaving enzyme)]; FUT1 [fucosyltransferase 1 (galactoside 2-alpha-L-fucosyltransferase, H blood group)]; FUT2 [fucosyltransferase 2 (secretor status included)]; FUT3 [fucosyltransferase 3 (galactoside 3(4)-L-fucosyltransferase, Lewis blood group)]; FUT4 [fucosyltransferase 4 (alpha (1,3) fucosyltransferase, myeloid-specific)]; FUT7 [fucosyltransferase 7 (alpha (1,3) fucosyltransferase)]; FUT8 [fucosyltransferase 8 (alpha (1,6) fucosyltransferase)]; FXN [frataxin]; FYN [FYN oncogene related to SRC, FGR, YES]; FZD4 [frizzled homolog 4 (Drosophila)]; G6PC3 [glucose 6 phosphatase, catalytic, 3]; G6PD [glucose-6-phosphate dehydrogenase]; GAA [glucosidase, alpha; acid]; GAB2 [GRB2-associated binding protein 2]; GABBR1 [gamma-aminobutyric acid (GABA) B receptor, 1]; GABRB3 [gamma-aminobutyric acid (GABA) A receptor, beta 3]; GABRE [gamma-aminobutyric acid (GABA) A receptor, epsilon]; GAD1 [glutamate decarboxylase 1 (brain, 67 kDa)]; GAD2 [glutamate decarboxylase 2 (pancreatic islets and brain, 65 kDa)]; GADD45A [growth arrest and DNA-damage-inducible, alpha]; GAL [galanin prepropeptide]; GALC [galactosylceramidase]; GALK1 [galactokinase 1]; GALR1 [galanin receptor 1]; GAP43 [growth associated protein 43]; GAPDH [glyceraldehyde-3-phosphate dehydrogenase]; GART [phosphoribosylglycinamide formyltransferase, phosphoribosylglycinamide synthetase, phosphoribosylaminoimidazole synthetase]; GAST [gastrin]; GATA1 [GATA binding protein 1 (globin transcription factor 1)]; GATA2 [GATA binding protein 2]; GATA3 [GATA binding protein 3]; GATA4 [GATA binding protein 4]; GATA6 [GATA binding protein 6]; GBA [glucosidase, beta, acid]; GBA3 [glucosidase, beta, acid 3 (cytosolic)]; GBE1 [glucan (1 [4-alpha-), branching enzyme 1]; GC [group-specific component (vitamin D binding protein)]; GCG [glucagon]; GCH1 [GTP cyclohydrolase 1]; GCKR [glucokinase (hexokinase 4) regulator]; GCLC [glutamate-cysteine ligase, catalytic subunit]; GCLM [glutamate-cysteine ligase, modifier subunit]; GCNT2 [glucosaminyl (N-acetyl) transferase 2, 1-branching enzyme (I blood group)]; GDAP1 [ganglioside-induced differentiation-associated protein 1]; GDF15 [growth differentiation factor 15]; GDNF [glial cell derived neurotrophic factor]; GFAP [glial fibrillary acidic protein]; GGH [gamma-glutamyl hydrolase (conjugase, folylpolygammaglutamyl hydrolase)]; GGT1 [gamma-glutamyltransferase 1]; GGT2 [gamma-glutamyltransferase 2]; GH1 [growth hormone 1]; GHR [growth hormone receptor]; GHRH [growth hormone releasing hormone]; GHRL [ghrelin/obestatin prepropeptide]; GHSR [growth hormone secretagogue receptor]; GIF [gastric intrinsic factor (vitamin B synthesis)]; GIP [gastric inhibitory polypeptide]; GJA1 [gap junction protein, alpha 1, 43 kDa]; GJA4 [gap junction protein, alpha 4, 37 kDa]; GJB2 [gap junction protein, beta 2, 26 kDa]; GLA [galactosidase, alpha]; GLB1 [galactosidase, beta 1]; GLI2 [GLI family zinc finger 2]; GLMN [glomulin, FKBP associated protein]; GLX [glutaredoxin (thioltransferase)]; GLS [glutaminase]; GLT25D1 [glycosyltransferase 25 domain containing 1]; GLUL [glutamate-ammonia ligase (glutamine synthetase)]; GLYAT [glycine-N-acyltransferase]; GM2A [GM2 ganglioside activator]; GMDS [GDP-mannose 4 [6-dehydratase]; GNA12 [guanine nucleotide binding protein (G protein) alpha 12]; GNA13 [guanine nucleotide binding protein (G protein), alpha 13]; GNA11 [guanine nucleotide binding protein (G protein), alpha inhibiting activity polypeptide 1]; GNAO1 [guanine nucleotide binding protein (G protein), alpha activating activity polypeptide 0]; GNAQ [guanine nucleotide binding protein (G protein), q polypeptide]; GNAS [GNAS complex locus]; GNAZ [guanine nucleotide binding protein (G protein), alpha z polypeptide]; GNB1 [guanine nucleotide binding protein (G protein), beta polypeptide 1]; GNB 1L [guanine nucleotide binding protein (G protein), beta polypeptide 1-like]; GNB2L1 [guanine nucleotide binding protein (G protein), beta polypeptide 2-like 1]; GNB3 [guanine nucleotide binding protein (G protein), beta polypeptide 3]; GNE [glucosamine (UDP-N-acetyl)-2-epimerase/N-acetylmannosamine kinase]; GNG2 [guanine nucleotide binding protein (G protein), gamma 2]; GNLY [granulysin]; GNPAT [glyceronephosphate O-acyltransferase]; GNPDA2 [glucosamine-6-phosphate deaminase 2]; GNRH1 [gonadotropin-releasing hormone 1 (luteinizing-releasing hormone)]; GNRHR [gonadotropin-releasing hormone receptor]; GOLGA8B [golgin A8 family, member B]; GOLGB [golgin B1]; GOT1 [glutamic-oxaloacetic transaminase 1, soluble (aspartate aminotransferase 1)]; GOT2 [glutamic-oxaloacetic transaminase 2, mitochondrial (aspartate aminotransferase 2)]; GP1BA [glycoprotein 1b (platelet), alpha polypeptide]; GP2 [glycoprotein 2 (zymogen granule membrane)]; GP6 [glycoprotein VI (platelet)]; GPBAR1 [G protein-coupled bile acid receptor 1]; GPC5 [glypican 5]; GPI [glucose phosphate isomerase]; GPLD1 [glycosylphosphatidylinositol specific phospholipase D1]; GPN1 [GPN-loop GTPase 1]; GPR1 [G protein-coupled receptor 1]; GPR12 [G protein-coupled receptor 12]; GPR123 [G protein-coupled receptor 123]; GPR143 [G protein-coupled receptor 143]; GPR15 [G protein-coupled receptor 15]; GPR182 [G protein-coupled receptor 182]; GPR44 [G protein-coupled receptor 44]; GPR77 [G protein-coupled receptor 77]; GPRASP1 [G protein-coupled receptor associated sorting protein 1]; GPRC6A [G protein-coupled receptor, family C, group 6, member A]; GPT [glutamic-pyruvate transaminase (alanine aminotransferase)]; GPX1 [glutathione peroxidase 1]; GPX2 [glutathione peroxidase 2 (gastrointestinal)]; GPX3 [glutathione peroxidase 3 (plasma)]; GRAP2 [GRB2-related adaptor protein 2]; GRB2 [growth factor receptor-bound protein 2]; GRIA2 [glutamate receptor, ionotropic, AMPA2]; GRIN1 [glutamate receptor, ionotropic, N-methyl D-aspartate 1]; GRIN2A [glutamate receptor, ionotropic, N-methyl D-aspartate 2A]; GRIN2B [glutamate receptor, ionotropic, N-methyl D-aspartate 2B]; GRIN2C [glutamate receptor, ionotropic, N-methyl D-aspartate 20]; GRIN2D [glutamate receptor, ionotropic, N-methyl D-aspartate 2D]; GRIN3A [glutamate receptor, ionotropic, N-methyl-D-aspartate 3A]; GRIN3B [glutamate receptor, ionotropic, N-methyl-D-aspartate 3B]; GRK5 [G protein-coupled receptor kinase 5]; GRLF1 [glucocorticoid receptor DNA binding factor 1]; GRM1 [glutamate receptor, metabotropic 1]; GRP [gastrin-releasing peptide]; GRPR [gastrin-releasing peptide receptor]; GSC [goosecoid homeobox]; GSC2 [goosecoid homeobox 2]; GSDMB [gasdermin B]; GSK3B [glycogen synthase kinase 3 beta]; GSN [gelsolin]; GSR [glutathione reductase]; GSS [glutathione synthetase]; GSTA1 [glutathione S-transferase alpha 1]; GSTA2 [glutathione S-transferase alpha 2]; GSTM1 [glutathione S-transferase mu 1]; GSTM3 [glutathione S-transferase mu 3 (brain)]; GST02 [glutathione S-transferase omega 2]; GSTP1 [glutathione S-transferase pi 1]; GSTT1 [glutathione S-transferase theta 1]; GTF2A1 [general transcription factor IIA, 1, 19/37 kDa]; GTF2F1 [general transcription factor IIF, polypeptide 1, 74 kDa]; GTF2H2 [general transcription factor IIH, polypeptide 2, 44 kDa]; GTF2H4 [general transcription factor IIH, polypeptide 4, 52 kDa]; GTF2H5 [general transcription factor IIH, polypeptide 5]; GTF2I [general transcription factor IIi]; GTF3A [general transcription factor 11A]; GUCA2A [guanylate cyclase activator 2A (guanylin)]; GUCA2B [guanylate cyclase activator 2B (uroguanylin)]; GUCY2C [guanylate cyclase 2C (heat stable enterotoxin receptor)]; GUK1 [guanylate kinase 1]; GULP1 [GULP, engulfment adaptor PTB domain containing 1]; GUSB [glucuronidase, beta]; GYPA [glycophorin A (MNS blood group)]; GYPB [glycophorin B (MNS blood group)]; GYPC [glycophorin C (Gerbich blood group)]; GYPE [glycophorin E (MNS blood group)]; GYS1 [glycogen synthase 1 (muscle)]; GZMA [granzyme A (granzyme 1, cytotoxic T-lymphocyte-associated serine esterase 3)]; GZMB [granzyme B (granzyme 2, cytotoxic T-lymphocyte-associated serine esterase 1)]; GZMK [granzyme K (granzyme 3; tryptase II)]; H1F0 [H1 histone family, member 0]; H2AFX [H2A histone family, member X]; HABP2 [hyaluronan binding protein 2]; HACL [2-hydroxyacyl-CoA lyase 1]; HADHA [hydroxyacyl-Coenzyme A dehydrogenase/3-ketoacyl-Coenzyme A thiolase/enoyl-Coenzyme A hydratase (trifunctional protein), alpha subunit]; HAL [histidine ammonia-lyase]; HAMP [hepcidin antimicrobial peptide]; HAPLN1 [hyaluronan and proteoglycan link protein1]; HAVCR1 [hepatitis A virus cellular receptor 1]; HAVCR2 [hepatitis A virus cellular receptor 2]; HAX1 [HCLS1 associated protein X-1]; HBA1 [hemoglobin, alpha 1]; HBA2 [hemoglobin, alpha 2]; HBB [hemoglobin, beta]; HBE1 [hemoglobin, epsilon 1]; HBEGF [heparin-binding EGF-Iike growth factor]; HBG2 [hemoglobin, gamma G]; HCCS [holocytochrome c synthase (cytochrome c heme-lyase)]; HCK [hemopoietic cell kinase]; HCRT [hypocretin (orexin) neuropeptide precursor]; HCRTR1 [hypocretin (orexin) receptor 1]; HCRTR2 [hypocretin (orexin) receptor 2]; HOST [hematopoietic cell signal transducer]; HDAC1 [histone deacetylase 1]; HDAC2 [histone deacetylase 2]; HDAC6 [histone deacetylase 6]; HDAC9 [histone deacetylase 9]; HOC [histidine decarboxylase]; HERC2 [hect domain and RLD 2]; HES1 [hairy and enhancer of split 1, (Drosophila)]; HES6 [hairy and enhancer of split 6 (Drosophila)]; HESX1 [HESX homeobox 1]; HEXA [hexosaminidase A (alpha polypeptide)]; HEXB [hexosaminidase B (beta polypeptide)]; HFE [hemochromatosis]; HGF [hepatocyte growth factor (hepapoietin A; scatter factor)]; HGS [hepatocyte growth factor-regulated tyrosine kinase substrate]; HGSNAT [heparan-alpha-glucosaminide N-acetyltransferase]; HIF1A [hypoxia inducible factor 1, alpha subunit (basic helix-loop-helix transcription factor)]; HINFP [histone H4 transcription factor]; HINT1 [histidine triad nucleotide binding protein 1]; HIPK2 [homeodomain interacting protein kinase 2]; HIRA [HIR histone cell cycle regulation defective homolog A (S. cerevisiae)]; HIST1H1B [histone cluster 1, H1b]; HIST1H3E [histone cluster 1, H3e]; HIST2H2AC [histone cluster 2, H2ac]; HIST2H3C [histone cluster 2, H3c]; HIST4H4 [histone cluster 4, H4]; HJURP [Holliday junction recognition protein]; HK2 [hexokinase 2]; HLA-A [major histocompatibility complex, class 1, A]; HLA-B [major histocompatibility complex, class 1, B]; HLA-C [major histocompatibility complex, class I, C]; HLA-DMA [major histocompatibility complex, class II, OM alpha]; HLA-DMB [major histocompatibility complex, class II, DM beta]; HLA-DOA [major histocompatibility complex, class II, DO alpha]; HLA-DOB [major histocompatibility complex, class II, DO beta]; HLA-DPA1 [major histocompatibility complex, class II, DP alpha 1]; HLA-DPB1 [major histocompatibility complex, class II, DP beta 1]; HLA-DQA1 [major histocompatibility complex, class II, DQ alpha 1]; HLA-DQA2 [major histocompatibility complex, class II, DQ alpha 2]; HLA-DQB1 [major histocompatibility complex, class II, DQ beta 1]; HLA-DRA [major histocompatibility complex, class II, DR alpha]; HLA-DRB1 [major histocompatibility complex, class II, DR beta 1]; HLA-DRB3 [major histocompatibility complex, class II, DR beta 3]; HLA-DRB4 [major histocompatibility complex, class II, DR beta 4]; HLA-DRB5 [major histocompatibility complex, class II, DR beta 5]; HLA-E [major histocompatibility complex, class I, E]; HLA-F [major histocompatibility complex, class I, F]; HLA-G [major histocompatibility complex, class I, G]; HLCS [holocarboxylase synthetase (biotin-(proprionyl-Coenzyme A-carboxylase (ATP-hydrolysing)) ligase)]; HLTF [helicase-like transcription factor]; HLX [H2.0-like homeobox]; HMBS [hydroxymethylbilane synthase]; HMGA1 [high mobility group AT-hook 1]; HMGB1 [high-mobility group box 1]; HMGCR [3-hydroxy-3-methylglutaryl-Coenzyme A reductase]; HMOX1 [heme oxygenase (decycling) 1]; HMOX2 [heme oxygenase (decycling) 2]; HNF1A [HNF1 homeoboxA]; HNF4A [hepatocyte nuclear factor 4, alpha]; HNMT [histamine N-methyltransferase]; HNRNPA [heterogeneous nuclear ribonucleoprotein A1]; HNRNPA2B1 [heterogeneous nuclear ribonucleoprotein A2/B1]; HNRNPH2 [heterogeneous nuclear ribonucleoprotein H2 (H′)]; HNRNPUL1 [heterogeneous nuclear ribonucleoprotein U-like 1]; HOXA13 [homeobox A13]; HOXA4 [homeobox A4]; HOXA9 [homeobox A9]; HOXB4 [homeobox B4]; HP [haptoglobin]; HPGDS [hematopoietic prostaglandin D synthase]; HPR [haptoglobin-related protein]; HPRT1 [hypoxanthine phosphoribosyltransferase 1]; HPS1 [Hermansky-Pudlak syndrome 1]; HPS3 [Hermansky-Pudlak syndrome 3]; HPS4 [Hermansky-Pudlak syndrome 4]; HPSE [heparanase]; HPX [hemopexin]; HRAS [v-Ha-ras Harvey rat sarcoma viral oncogene homolog]; HRG [histidine-rich glycoprotein]; HRH1 [histamine receptor H1]; HRH2 [histamine receptor H2]; HRH3 [histamine receptor H3]; HRH4 [histamine receptor H4]; HSD11B1 [hydroxysteroid (11-beta) dehydrogenase 1]; HSD11B2 [hydroxysteroid (11-beta) dehydrogenase 2]; HSD17B1 [hydroxysteroid (17-beta) dehydrogenase 1]; HSD17B4 [hydroxysteroid (17-beta) dehydrogenase 4]; HSF1 [heat shock transcription factor 1]; HSP90AA1 [heat shock protein 90 kDa alpha (cytosolic), class A member 1]; HSP90AB1 [heat shock protein 90 kDa alpha (cytosolic), class B member 1]; HSP90B1 [heat shock protein 90 kDa beta (Grp94), member 1]; HSPA14 [heat shock 70 kDa protein 14]; HSPA1A [heat shock 70 kDa protein 1A]; HSPA1B [heat shock 70 kDa protein 1B]; HSPA2 [heat shock 70 kDa protein 2]; HSPA4 [heat shock 70 kDa protein 4]; HSPA5 [heat shock 70 kDa protein 5 (glucose-regulated protein, 78 kDa)]; HSPA8 [heat shock 70 kDa protein 8]; HSPB1 [heat shock 27 kDa protein 1]; HSPB2 [heat shock 27 kDa protein 2]; HSPD1 [heat shock 60 kDa protein 1 (chaperonin)]; HSPE1 [heat shock 10 kDa protein 1 (chaperonin 10)]; HSPG2 [heparan sulfate proteoglycan 2]; HTN3 [histatin 3]; HTR1A [5-hydroxytryptamine (serotonin) receptor 1A]; HTR2A [5-hydroxytryptamine (serotonin) receptor 2A]; HTR3A [5-hydroxytryptamine (serotonin) receptor 3A]; HTRA1 [HtrA serine peptidase 1]; HTT [huntingtin]; HUS1 [HUS1 checkpoint homolog (S. pombe)]; HUWE1 [HECT, UBA and WWE domain containing 1]; HYAL [hyaluronoglucosaminidase 1]; HYLS1 [hydrolethalus syndrome 1]; IAPP [islet amyloid polypeptide]; IBSP [integrin-binding sialoprotein]; ICAM1 [intercellular adhesion molecule 1]; ICAM2 [intercellular adhesion molecule 2]; ICAM3 [intercellular adhesion molecule 3]; ICAM4 [intercellular adhesion molecule 4 (Landsteiner-Wiener blood group)]; ICOS [inducible T-cell co-stimulator]; ICOSLG [inducible T-cell co-stimulator ligand]; ID1 [inhibitor of DNA binding 1, dominant negative helix-loop-helix protein]; ID2 [inhibitor of DNA binding 2, dominant negative helix-loop-helix protein]; IDO1 [indoleamine 2 [3-dioxygenase 1]; IDS [iduronate 2-sulfatase]; IDUA [iduronidase, alpha-L-]; IF127 [interferon, alpha-inducible protein 27]; IFI30 [interferon, gamma-inducible protein 30]; IFITM 1 [interferon induced transmembrane protein 1 (9-27)]; IFNA 1 [interferon, alpha 1]; IFNA 2 [interferon, alpha 2]; IFNAR1 [interferon (alpha, beta and omega) receptor 1]; IFNAR2 [interferon (alpha, beta and omega) receptor 2]; IFNB1 [interferon, beta 1, fibroblast]; IFNG [interferon, gamma]; IFNGR1 [interferon gamma receptor 1]; IFNGR2 [interferon gamma receptor 2 (interferon gamma transducer 1)]; IGF1 [insulin-like growth factor 1 (somatomedin C)]; IGF1R [insulin-like growth factor 1 receptor]; IGF2 [insulin-like growth factor 2 (somatomedin A)]; IGF2R [insulin-like growth factor 2 receptor]; IGFBP1 [insulin-like growth factor binding protein 1]; IGFBP2 [insulin-like growth factor binding protein 2, 36 kDa]; IGFBP3 [insulin-like growth factor binding protein 3]; IGFBP4 [insulin-like growth factor binding protein 4]; IGFBP5 [insulin-like growth factor binding protein 5]; IGHA [immunoglobulin heavy constant alpha 1]; IGHE [immunoglobulin heavy constant epsilon]; IGHG1 [immunoglobulin heavy constant gamma 1 (GI m marker)]; IGHG3 [immunoglobulin heavy constant gamma 3 (G3m marker)]; IGHG4 [immunoglobulin heavy constant gamma 4 (G4m marker)]; IGHM [immunoglobulin heavy constant mu]; IGHMBP2 [immunoglobulin mu binding protein 2]; IGKC [immunoglobulin kappa constant]; IGKV2D-29 [immunoglobulin kappa variable 2D-29]; IGLL1 [immunoglobulin lambda-like polypeptide 1]; IGSF1 [immunoglobulin superfamily, member 1]; IKBKAP [inhibitor of kappa light polypeptide gene enhancer in B-cells, kinase complex-associated protein]; IKBKB [inhibitor of kappa light polypeptide gene enhancer in B-cells, kinase beta]; IKBKE [inhibitor of kappa light polypeptide gene enhancer in B-cells, kinase epsilon]; IKBKG [inhibitor of kappa light polypeptide gene enhancer in B-cells, kinase gamma]; IKZF1 [IKAROS family zinc finger 1 (Ikaros)]; IKZF2 [IKAROS family zinc finger 2 (Helios)]; IL10 [interleukin 10]; I110RA [interleukin 10 receptor, alpha]; IL10RB [interleukin 10 receptor, beta]; IL11 [interleukin 11]; IL12A [interleukin 12A (natural killer cell stimulatory factor 1, cytotoxic lymphocyte maturation factor 1, p35)]; IL12B [interleukin 12B (natural killer cell stimulatory factor 2, cytotoxic lymphocyte maturation factor 2, p40)]; IL12RB1 [interleukin 12 receptor, beta 1]; IL12RB2 [interleukin 12 receptor, beta 2]; IL13 [interleukin 13]; IL13RA [interleukin 13 receptor, alpha 1]; IL13RA2 [interleukin 13 receptor, alpha 2]; IL15 [interleukin 15]; IL15RA [interleukin 15 receptor, alpha]; IL16 [interleukin 16 (lymphocyte chemoattractant factor)]; IL17A [interleukin 17A]; IL17F [interleukin 17F]; IL17RA [interleukin 17 receptor A]; IL17RB [interleukin 17 receptor B]; IL17RC [interleukin 17 receptor C]; IL18 [interleukin 18 (interferon-gamma-inducing factor)]; IL18BP [interleukin 18 binding protein]; IL18R1 [interleukin 18 receptor 1]; IL18RAP [interleukin 18 receptor accessory protein]; IL19 [interleukin 19]; ILIA [interleukin 1, alpha]; IL1B [interleukin 1, beta]; IL1F9 [interleukin 1 family, member 9]; IL1R [interleukin 1 receptor, type I]; IL1RAP [interleukin 1 receptor accessory protein]; IL1RL [interleukin 1 receptor-like 1]; IL1RN [interleukin 1 receptor antagonist]; IL2 [interleukin 2]; IL20 [interleukin 20]; IL21 [interleukin 21]; IL21R [interleukin 21 receptor]; IL22 [interleukin 22]; IL23A [interleukin 23, alpha subunit p19]; IL23R [interleukin 23 receptor]; IL24 [interleukin 24]; IL25 [interleukin 25]; IL26 [interleukin 26]; IL27 [interleukin 27]; IL27RA [interleukin 27 receptor, alpha]; IL29 [interleukin 29 (interferon, lambda 1)]; IL2RA [interleukin 2 receptor, alpha]; IL2RB [interleukin 2 receptor, beta]; IL2RG [interleukin 2 receptor, gamma (severe combined immunodeficiency)]; IL3 [interleukin 3 (colony-stimulating factor, multiple)]; IL31 [interleukin 31]; IL32 [interleukin 32]; IL33 [interleukin 33]; IL3RA [interleukin 3 receptor, alpha (low affinity)]; IL4 [interleukin 4]; ILAR [interleukin 4 receptor]; IL5 [interleukin 5 (colony-stimulating factor, eosinophil)]; IL5RA [interleukin 5 receptor, alpha]; IL6 [interleukin 6 (interferon, beta 2)]; IL6R [interleukin 6 receptor]; IL6ST [interleukin 6 signal transducer (gp130, oncostatin M receptor)]; IL7 [interleukin 7]; IL7R [interleukin 7 receptor]; IL8 [interleukin 8]; IL9 [interleukin 9]; IL9R [interleukin 9 receptor]; ILK [integrin-linked kinase]; IMPS [intramembrane protease 5]; INCENP [inner centromere protein antigens 135/155 kDa]; ING1 [inhibitor of growth family, member 1]; INHA [inhibin, alpha]; INHBA [inhibin, beta A]; INPP4A [inositol polyphosphate-4-phosphatase, type I, 107 kDa]; INPP5D [inositol polyphosphate-5-phosphatase, 145 kDa]; INPP5E [inositol polyphosphate-5-phosphatase, 72 kDa]; INPPL1 [inositol polyphosphate phosphatase-like 1]; INS [insulin]; INSL3 [insulin-like 3 (Leydig cell)]; INSR [insulin receptor]; IP013 [importin13]; IP07 [importin 7]; IQGAP1 [IQ motif containing GTPase activating protein 1]; IRAK1 [interleukin-1 receptor-associated kinase 1]; IRAK3 [interleukin-1 receptor-associated kinase 3]; IRAK4 [interleukin-1 receptor-associated kinase 4]; IRF1 [interferon regulatory factor 1]; IRF2 [interferon regulatory factor 2]; IRF3 [interferon regulatory factor 3]; IRF4 [interferon regulatory factor 4]; IRF5 [interferon regulatory factor 5]; IRF7 [interferon regulatory factor 7]; IRF8 [interferon regulatory factor 8]; IRGM [immunity-related GTPase family, M]; IRS1 [insulin receptor substrate 1]; IRS2 [insulin receptor substrate 2]; IRS4 [insulin receptor substrate 4]; ISG15 [ISG15 ubiquitin-like modifier]; ITCH [itchy E3 ubiquitin protein ligase homolog (mouse)]; ITFG1 [integrin alpha FG-GAP repeat containing 1]; ITGA1 [integrin, alpha 1]; ITGA2 [integrin, alpha 2 (CD49B, alpha 2 subunit of VLA-2 receptor)]; ITGA2B [integrin, alpha 2b (platelet glycoprotein IIb of IIb/IIIa complex, antigen CD41)]; ITGA3 [integrin, alpha 3 (antigen CD49C, alpha 3 subunit of VLA-3 receptor)]; ITGA4 [integrin, alpha 4 (antigen CD49D, alpha 4 subunit of VLA-4 receptor)]; ITGA5 [integrin, alpha 5 (fibronectin receptor, alpha polypeptide)]; ITGA6 [integrin, alpha 6]; ITGA8 [integrin, alpha 8]; ITGAE [integrin, alpha E (antigen CD103, human mucosal lymphocyte antigen 1; alpha polypeptide)]; ITGAL [integrin, alpha L (antigen CD11A (p180), lymphocyte function-associated antigen 1; alpha polypeptide)]; ITGAM [integrin, alpha M (complement component 3 receptor 3 subunit)]; ITGAV [integrin, alpha V (vitronectin receptor, alpha polypeptide, antigen CD51)]; ITGAX [integrin, alpha X (complement component 3 receptor 4 subunit)]; ITGB1 [integrin, beta 1 (fibronectin receptor, beta polypeptide, antigen CD29 includes MDF2, MSK12)]; ITGB2 [integrin, beta 2 (complement component 3 receptor 3 and 4 subunit)]; ITGB3 [integrin, beta 3 (platelet glycoprotein IIIa, antigen CD61)]; ITGB3BP [integrin beta 3 binding protein (beta3-endonexin)]; ITGB4 [integrin, beta 4]; ITGB6 [integrin, beta 6]; ITGB7 [integrin, beta 7]; ITIH4 [inter-alpha (globulin) inhibitor H4 (plasma Kallikrein-sensitive glycoprotein)]; ITK [1L2-inducible T-cell kinase]; ITLN1 [intelectin 1 (galactofuranose binding)]; ITLN2 [intelectin 2]; ITPA [inosine triphosphatase (nucleoside triphosphate pyrophosphatase)]; ITPR1 [inositol1,4,5-triphosphate receptor, type 1]; ITPR3 [inositol1,4,5-triphosphate receptor, type 3]; IVD [isovaleryl Coenzyme A dehydrogenase]; IVL [involucrin]; IVNS1ABP [influenza virus NS1A binding protein]; JAG1 [jagged 1 (Alagille syndrome)]; JAK1 [Janus kinase 1]; JAK2 [Janus kinase 2]; JAK3 [Janus kinase 3]; JAKMIP1 [janus kinase and microtubule interacting protein1]; JMJD6 [jumonji domain containing 6]; JPH4 [junctophilin 4]; JRKL [jerky homolog-like (mouse)]; JUN [jun oncogene]; JUND [jun D proto-oncogene]; JUP [junction plakoglobin]; KARS [lysyl-tRNA synthetase]; KAT5 [K(lysine) acetyltransferase 5]; KCNA2 [potassium voltage-gated channel, shaker-related subfamily, member 2]; KCNA5 [potassium voltage-gated channel, shaker-related subfamily, member 5]; KCND1 [potassium voltage-gated channel, Shal-related subfamily, member 1]; KCNH2 [potassium voltage-gated channel, subfamily H (eag-related), member 2]; KCNIP4 [Kv channel interacting protein 4]; KCNMA1 [potassium large conductance calcium-activated channel, subfamily M, alpha member 1]; KCNMB1 [potassium large conductance calcium-activated channel, subfamily M, beta member 1]; KCNN3 [potassium intermediate/small conductance calcium-activated channel, subfamily N, member 3]; KCNS3 [potassium voltage-gated channel, delayed-rectifier, subfamily S, member 3]; KDR [kinase insert domain receptor (a type III receptor tyrosine kinase)]; KHDRBS1 [KH domain containing, RNA binding, signal transduction associated 1]; KHDRBS3 [KH domain containing, RNA binding, signal transduction associated 3]; KIAA0101 [KIAA0101]; KIF16B [kinesin family member 16B]; KIF20B [kinesin family member 20B]; KIF21B [kinesin family member 21B]; KIF22 [kinesin family member 22]; KIF2B [kinesin family member 2B]; KTF2C [kinesin family member 20]; KTR2DL1 [killer cell immunoglobulin-like receptor, two domains, long cytoplasmic tail, 1]; KIR2DL2 [killer cell immunoglobulin-like receptor, two domains, long cytoplasmic tail, 2]; KIR2DL3 [killer cell immunoglobulin-like receptor, two domains, long cytoplasmic tail, 3]; KIR2DL5A [killer cell immunoglobulin-like receptor, two domains, long cytoplasmic tail, 5A]; KIR2DS1 [killer cell immunoglobulin-like receptor, two domains, short cytoplasmic tail, 1]; KIR2DS2 [killer cell immunoglobulin-like receptor, two domains, shmi cytoplasmic tail, 2]; KIR2DS5 [killer cell immunoglobulin-like receptor, two domains, shmi cytoplasmic tail, 5]; KIR3DL1 [killer cell immunoglobulin-like receptor, three domains, long cytoplasmic tail, 1]; KIR3DS1 [killer cell immunoglobulin-like receptor, three domains, short cytoplasmic tail, 1]; KISS1 [KiSS-1 metastasis-suppressor]; KISSIR [KISS1 receptor]; KIT [v-kit Hardy-Zuckerman 4 feline sarcoma viral oncogene homolog]; KITLG [KIT ligand]; KLF2 [Kruppel-like factor 2 (lung)]; KLF4 [Kruppel-like factor 4 (gut)]; KLK1 [kallikrein 1]; KLK11 [kallikrein-related peptidase 11]; KLK3 [kallikrein-related peptidase 3]; KLKB1 [kallikrein B, plasma (Fletcher factor) 1]; KLRB1 [killer cell lectin-like receptor subfamily B, member 1]; KLRC1 [killer cell lectin-like receptor subfamily C, member 1]; KLRD1 [killer cell lectin-like receptor subfamily D, member 1]; KLRK1 [killer cell lectin-like receptor subfamily K, member 1]; KNG1 [kininogen 1]; KPNA1 [karyopherin alpha 1 (importin alpha 5)]; KPNA2 [karyopherin alpha 2 (RAG cohort 1, importin alpha 1)]; KPNB1 [karyopherin (importin) beta 1]; KRAS [v-Ki-ras2 Kirsten rat sarcoma viral oncogene homolog]; KRT1 [keratin 1]; KRT10 [keratin 10]; KRT13 [keratin 13]; KRT14 [keratin 14]; KRT16 [keratin 16]; KRT18 [keratin 18]; KRT19 [keratin 19]; KRT20 [keratin 20]; KRT5 [keratin 5]; KRT7 [keratin 7]; KRT8 [keratin 8]; KRT9 [keratin 9]; KRTAP19-3 [keratin associated protein 19-3]; KRTAP2-1, keratin associated protein 2-1]; L1 CAM [L1 cell adhesion molecule]; LACTB [lactamase, beta]; LAG3 [lymphocyte-activation gene 3]; LALBA [lactalbumin, alpha-]; LAMA1 [laminin, alpha 1]; LAMA2 [laminin, alpha 2]; LAMA3 [laminin, alpha 3]; LAMA4 [laminin, alpha4]; LAMB1 [laminin, beta 1]; LAMB2 [laminin, beta 2 (laminin S)]; LAMB3 [laminin, beta 3]; LAMC1 [laminin, gamma 1 (formerly LAMB2)]; LAMC2 [laminin, gamma 2]; LAMP1 [lysosomal-associated membrane protein 1]; LAMP2 [lysosomal-associated membrane protein 2]; LAMP3 [lysosomal-associated membrane protein 3]; LAP3 [leucine aminopeptidase 3]; LAPTM4A [lysosomal protein transmembrane 4 alpha]; LAT [linker for activation of T cells]; LBP [lipopolysaccharide binding protein]; LBR [lamin B receptor]; LBXCOR1 [Lbxcor 1 homolog (mouse)]; LCAT [lecithin-cholesterol acyltransferase]; LCK [lymphocyte-specific protein tyrosine kinase]; LCN1 [lipocalin 1 (tear prealbumin)]; LCN2 [lipocalin 2]; LCP1 [lymphocyte cytosolic protein 1 (L-plastin)]; LCT [lactase]; LDLR [low density lipoprotein receptor]; LDLRAP1 [low density lipoprotein receptor adaptor protein 1]; LECT2 [leukocyte cell-derived chemotaxin 2]; LELP1 [late cornified envelope-like proline-rich 1]; LEMD3 [LEM domain containing 3]; LEP [leptin]; LEPR [leptin receptor]; LGALS1 [lectin, galactoside-binding, soluble, 1]; LGALS3 [lectin, galactoside-binding, soluble, 3]; LGALS3BP [lectin, galactoside-binding, soluble, 3 binding protein]; LGALS4 [lectin, galactoside-binding, soluble, 4]; LGALS9 [lectin, galactoside-binding, soluble, 9]; LGALS9B [lectin, galactoside-binding, soluble, 9B]; LGR4 [leucine-rich repeat-containing G protein-coupled receptor 4]; LHCGR [luteinizing hormone/choriogonadotropin receptor]; LIF [leukemia inhibitory factor (cholinergic differentiation factor)]; LIFR [leukemia inhibitory factor receptor alpha]; LIG1 [ligase I, DNA, ATP-dependent]; LIG3 [ligase III, DNA, ATP-dependent]; LIG4 [ligase IV, DNA, ATP-dependent]; LILRA3 [leukocyte immunoglobulin-like receptor, subfamily A (without TM domain), member 3]; LILRB4 [leukocyte immunoglobulin-like receptor, subfamily B (with TM and ITIM domains), member 4]; LIMS1 [LIM and senescent cell antigen-like domains 1]; LIPA [lipase A, lysosomal acid, cholesterol esterase]; LIPC [lipase, hepatic]; LIPE [lipase, hormone-sensitive]; LIPG [lipase, endothelial]; LMAN1 [lectin, mannose-binding, 1]; LMLN [leishmanolysin-like (metallopeptidase M8 family)]; LMNA [lamin NC]; LMNB1 [lamin B1]; LMNB2 [lamin B2]; LOC646627 [phospholipase inhibitor]; LOX [lysyl oxidase]; LOXHD1 [lipoxygenase homology domains 1]; LOXL1 [lysyl oxidase-like 1]; LPA [lipoprotein, Lp(a)]; LPAR3 [lysophosphatidic acid receptor 3]; LPCAT2 [lysophosphatidylcholine acyltransferase 2]; LPL [lipoprotein lipase]; LPO [lactoperoxidase]; LPP [LIM domain containing preferred translocation partner in lipoma]; LRBA [LPS-responsive vesicle trafficking, beach and anchor containing]; LRP1 [low density lipoprotein receptor-related protein 1]; LRP6 [low density lipoprotein receptor-related protein 6]; LRPAP1 [low density lipoprotein receptor-related protein associated protein 1]; LRRC32 [leucine rich repeat containing 32]; LRRC37B [leucine rich repeat containing 37B]; LRRC8A [leucine rich repeat containing 8 family, member A]; LRRK2 [leucine-rich repeat kinase 2]; LRTOMT [leucine rich transmembrane and O-methyltransferase domain containing]; LSM1 [LSM1 homolog. U6 small nuclear RNA associated (S. cerevisiae)]; LSM2 [LSM2 homolog, U6 small nuclear RNA associated (S. cerevisiae)]; LSP1 [lymphocyte-specific protein 1]; LTA [lymphotoxin alpha (TNF superfamily, member 1)]; LTA4H [leukotriene A4 hydrolase]; LTB [lymphotoxin beta (TNF superfamily, member 3)]; LTB4R [leukotriene B4 receptor]; LTB4R2 [leukotriene B4 receptor 2]; LTBR [lymphotoxin beta receptor (TNFR superfamily, member 3)]; LTC4S [leukotriene C4 synthase]; LTF [lactotransferrin]; LY86 [lymphocyte antigen 86]; LY9 [lymphocyte antigen 9]; LYN [v-yes-1 Yamaguchi sarcoma viral related oncogene homolog]; LYRM4 [LYR motif containing 4]; LYST [lysosomal trafficking regulator]; LYZ [lysozyme (renal amyloidosis)]; LYZL6 [lysozyme-like 6]; LZTR1 [leucine-zipper-like transcription regulator 1]; M6PR [mannose-6-phosphate receptor (cation dependent)]; MADCAM1 [mucosal vascular addressin cell adhesion molecule 1]; MAF [v-mafmusculoaponeurotic fibrosarcoma oncogene homolog (avian)]; MAG [myelin associated glycoprotein]; MAN2A1 [mannosidase, alpha, class 2A, member 1]; MAN2B1 [mannosidase, alpha, class 2B, member 1]; MANBA [mannosidase, beta A, lysosomal]; MANF [mesencephalic astrocyte-derived neurotrophic factor]; MAOB [monoamine oxidase B]; MAP2 [microtubule-associated protein 2]; MAP2KI [mitogen-activated protein kinase kinase 1]; MAP2K2 [mitogen-activated protein kinase kinase 2]; MAP2K3 [mitogen-activated protein kinase kinase 3]; MAP2K4 [mitogen-activated protein kinase kinase 4]; MAP3K1 [mitogen-activated protein kinase kinase kinase 1]; MAP3K11 [mitogen-activated protein kinase kinase kinase 11]; MAP3K14 [mitogen-activated protein kinase kinase kinase 14]; MAP3K5 [mitogen-activated protein kinase kinase kinase 5]; MAP3K7 [mitogen-activated protein kinase kinase kinase 7]; MAP3K9 [mitogen-activated protein kinase kinase kinase 9]; MAPK1 [mitogen-activated protein kinase 1]; MAPK10 [mitogen-activated protein kinase 10]; MAPK11 [mitogen-activated protein kinase 11]; MAPK12 [mitogen-activated protein kinase 12]; MAPK13 [mitogen-activated protein kinase 13]; MAPK14 [mitogen-activated protein kinase 14]; MAPK3 [mitogen-activated protein kinase 3]; MAPK8 [mitogen-activated protein kinase 8]; MAPK9 [mitogen-activated protein kinase 9]; MAPKAP1 [mitogen-activated protein kinase associated protein 1]; MAPKAPK2 [mitogen-activated protein kinase-activated protein kinase 2]; MAPKAPK5 [mitogen-activated protein kinase-activated protein kinase 5]; MAPT [microtubule-associated protein tau]; MARCKS [myristoylated alanine-rich protein kinase C substrate]; MASP2 [mannan-binding lectin serine peptidase 2]; MATN1 [matrilin 1, cartilage matrix protein]; MAVS [mitochondrial antiviral signaling protein]; MB [myoglobin]; MBD2 [methyl-CpG binding domain protein 2]; MBL2 [mannose-binding lectin (protein C) 2, soluble (opsonic defect)]; MBP [myelin basic protein]; MBTPS2 [membrane-bound transcription factor peptidase, site 2]; MC2R [melanocortin 2 receptor (adrenocorticotropic hormone)]; MC3R [melanocortin 3 receptor]; MC4R [melanocortin 4 receptor]; MCCC2 [methylcrotonoyl-Coenzyme A carboxylase 2 (beta)]; MCHR1 [melanin-concentrating hormone receptor 1]; MCL1 [myeloid cell leukemia sequence 1 (BCL2-related)]; MCM2 [minichromosome maintenance complex component 2]; MCM4 [minichromosome maintenance complex component 4]; MCOLN1 [mucolipin 1]; MCPH1 [microcephalin 1]; MDC1 [mediator of DNA-damage checkpoint 1]; MDH2 [malate dehydrogenase 2, NAD (mitochondrial)]; MDM2 [Mdm2 p53 binding protein homolog (mouse)]; ME2 [malic enzyme 2, NAD(+)-dependent, mitochondrial]; MECOM [MDS1 and EVI1 complex locus]; MED1 [mediator complex subunit 1]; MED12 [mediator complex subunit 12]; MED15 [mediator complex subunit 15]; MED28 [mediator complex subunit 28]; MEFV [Mediterranean fever]; MEN1 [multiple endocrine neoplasia 1]; MEPE [matrix extracellular phosphoglycoprotein]; MERTK [c-mer proto-oncogene tyrosine kinase]; MESP2 [mesoderm posterior 2 homolog (mouse)]; MET [met proto-oncogene (hepatocyte growth factor receptor)]; MGAM [maltase-glucoamylase (alpha-glucosidase)]; MGAT [mannosyl (alpha-1,3-)-glycoprotein beta-1,2-N-acetylglucosaminyltransferase]; MGAT2 [mannosyl (alpha-1,6-)-glycoprotein beta-1,2-N-acetylglucosaminyltransferase]; MGLL [monoglyceride lipase]; MGMT [0-6-methylguanine-DNA methyltransferase]; MGST2 [microsomal glutathione S-transferase 2]; MICA [MHC class I polypeptide-related sequence A]; MICB [MHC class I polypeptide-related sequence B]; MIF [macrophage migration inhibitory factor (glycosylation-inhibiting factor)]; MK167 [antigen identified by monoclonal antibody Ki-67]; MKS1 [Meckel syndrome, type 1]; MLH1 [mutL homolog 1, colon cancer, nonpolyposis type 2 (E. coli)]; MLL [myeloid/lymphoid or mixed-lineage leukemia (trithorax homolog, Drosophila)]; MLLT4 [myeloid/lymphoid or mixed-lineage leukemia (trithorax homolog, Drosophila); translocated to, 4]; MLN [motilin]; MLXTPL [MLX interacting protein-like]; MMAA [methylmalonic aciduria (cobalamin deficiency) cb1A type]; MMAB [methylmalonic aciduria (cobalamin deficiency) cb1B type]; MMACHC [methylmalonic aciduria (cobalamin deficiency) cb1C type, with homocystinuria]; MME [membrane metallo-endopeptidase]; MMP1 [matrix metallopeptidase 1 (interstitial collagenase)]; MMP10 [matrix metallopeptidase 10 (stromelysin 2)]; MMP12 [matrix metallopeptidase 12 (macrophage elastase)]; MMP13 [matrix metallopeptidase 13 (collagenase 3)]; MMP14 [matlix metallopeptidase 14 (membrane-inserted)]; MMP15 [matrix metallopeptidase 15 (membrane-inserted)]; MMP17 [matrix metallopeptidase 17 (membrane-inserted)]; MMP2 [matrix metallopeptidase 2 (gelatinase A, 72 kDa gelatinase, 72 kDa type IV collagenase)]; MMP20 [matrix metallopeptidase 20]; MMP21 [matrix metallopeptidase 21]; MMP28 [matrix metallopeptidase 28]; MMP3 [matrix metallopeptidase 3 (stromelysin 1, progelatinase)]; MMP7 [matrix metallopeptidase 7 (matrilysin, uterine)]; MMPR [matrix metallopeptidase R (neutrophil collagenase)]; MMP9 [matrix metallopeptidase 9 (gelatinase B, 92 kDa gelatinase, 92 kDa type IV collagenase)]; MMRN1 [multimerin 1]; MNAT1 [menage a trois homolog 1, cyclin H assembly factor (Xenopus laevis)]; MOG [myelin oligodendrocyte glycoprotein]; MOGS [mannosyl-oligosaccharide glucosidase]; MPG [N-methylpurine-DNA glycosylase]; MPL [myeloproliferative leukemia virus oncogene]; MPO [myeloperoxidase]; MPZ [myelin protein zero]; MR1 [major histocompatibility complex, class !-related]; MRC1 [mannose receptor. C type I]; MRC2 [mannose receptor, C type 2]; MRE11A [MRE11 meiotic recombination 11 homolog A (S. cerevisiae)]; MRGPRX1 [MAS-related GPR, member XI]; MRPL28 [mitochondrial ribosomal protein L28]; MRPL40 [mitochondrial ribosomal protein L40]; MRPS16 [mitochondrial ribosomal protein S16]; MRPS22 [mitochondrial ribosomal protein S22]; MS4A1 [membrane-spanning 4-domains, subfamily A, member 1]; MS4A2 [membrane-spanning 4-domains, subfamily A, member 2 (Fe fragment ofigE, high affinity I, receptor for, beta polypeptide)]; MS4A3 [membrane-spanning 4-domains, subfamily A, member 3 (hematopoietic cell-specific)]; MSH2 [mutS homolog 2, colon cancer, nonpolyposis type 1 (E. coli)]; MSH5 [mutS homolog 5 (E. coli)]; MSH6 [mutS homolog 6 (E. coli)]; MSLN [mesothelin]; MSN [moesin]; MSR1 [macrophage scavengerreceptor 1]; MST1 [macrophage stimulating 1 (hepatocyte growth factor-like)]; MST1R [macrophage stimulating 1 receptor (c-ruet-related tyrosine kinase)]; MSTN [myostatin]; MSX2 [msh homeobox 2]; MT2A [metallothionein 2A]; MTCH2 [mitochondrial carrier homolog 2 (C. elegans)]; MT-C02 [mitochondrially encoded cytochrome c oxidase II]; MTCP1 [mature T-cell proliferation 1]; MT-CYB [mitochondrially encoded cytochrome b]; MTHFD1 [methylenetetrahydrofolate dehydrogenase (NADP+ dependent) 1, methenyltetrahydrofolate cyclohydrolase, formyltetrahydrofolate synthetase]; MTHFR [5 [10-methylenetetrahydrofolate reductase (NADPH)]; MTMR14 [myotubularin related protein 14]; MTMR2 [myotubularin related protein 2]; MT-ND1 [mitochondrially encoded NADH dehydrogenase 1]; MT-ND2 [mitochondrially encoded NADH dehydrogenase 2]; MTOR [mechanistic target ofrapamycin (serine/threonine kinase)]; MTR [5-methyltetrahydrofolate-homocysteine methyltransferase]; MTRR [5-methyltetrahydrofolate-homocysteine methyltransferase reductase]; MTTP [microsomal triglyceride transfer protein]; MTX1 [metaxin 1]; MUC1 [mucin 1, cell surface associated]; MUC12 [mucin 12, cell surface associated]; MUC16 [mucin 16, cell surface associated]; MUC19 [mucin 19, oligomeric]; MUC2 [mucin 2, oligomeric mucus/gel-forming]; MUC3A [mucin 3A, cell surface associated]; MUC3B [mucin 3B, cell surface associated]; MUC4 [mucin 4, cell surface associated]; MUC5AC [mucin SAC, oligomeric mucus/gel-forming]; MUC5B [mucin 5B, oligomeric mucus/gel-forming]; MUC6 [mucin 6, oligomeric mucus/gel-forming]; MUC7 [mucin 7, secreted]; MUS81 [MUS81 endonuclease homolog (S. cerevisiae)]; MUSK [muscle, skeletal, receptor tyrosine kinase]; MUT [methylmalonyl Coenzyme A mutase]; MVK [mevalonate kinase]; MVP [major vault protein]; MX1 [myxovirus (influenza virus) resistance 1, interferon-inducible protein p78 (mouse)]; MYB [v-myb myeloblastosis viral oncogene homolog (avian)]; MYBPH [myosin binding protein H]; MYC [v-myc myelocytomatosis viral oncogene homolog (avian)]; MYCN [v-myc myelocytomatosis viral related oncogene, neuroblastoma derived (avian)]; MYD88 [myeloid differentiation primary response gene (88)]; MYH1 [myosin, heavy chain 1, skeletal muscle, adult]; MYH10 [myosin, heavy chain 10, non-muscle]; MYH1 [myosin, heavy chain 11, smooth muscle]; MYH14 [myosin, heavy chain 14, non-muscle]; MYH2 [myosin, heavy chain 2, skeletal muscle, adult]; MYH3 [myosin, heavy chain 3, skeletal muscle, embryonic]; MYH6 [myosin, heavy chain 6, cardiac muscle, alpha]; MYH7 [myosin, heavy chain 7, cardiac muscle, beta]; MYH8 [myosin, heavy chain 8, skeletal muscle, perinatal]; MYH9 [myosin, heavy chain 9, non-muscle]; MYL2 [myosin, light chain 2, regulatory, cardiac, slow]; MYL3 [myosin, light chain 3, alkali; ventricular, skeletal, slow]; MYL7 [myosin, light chain 7, regulatory]; MYL9 [myosin, light chain 9, regulatory]; MYLK [myosin light chain kinase]; MYO15A [myosin XVA]; MYO1A [myosin IA]; MYO1F [myosin IF]; MYO3A [myosin IIIA]; MY05A [myosin VA (heavy chain 12, myoxin)]; MY06 [myosin VI]; MY07A [myosin VIIA]; MY09B [myosin IXB]; MYOC [myocilin, trabecular meshwork inducible glucocorticoid response]; MYOD1 [myogenic differentiation 1]; MYOM2 [myomesin (M-protein) 2, 165 kDa]; MYST1 [MYST histone acetyltransferase 1]; MYST2 [MYST histone acetyltransferase 2]; MYST3 [MYST histone acetyltransferase (monocytic leukemia) 3]; MYST4 [MYST histone acetyltransferase (monocytic leukemia) 4]; NAGA [N-acetylgalactosaminidase, alpha-]; NAGLU [N-acetylglucosaminidase, alpha-]; NAMPT [nicotinamide phosphoribosyltransferase]; NANOG [Nanog homeobox]; NANOS1 [nanos homolog 1 (Drosophila)]; NAPA [N-ethylmaleimide-sensitive factor attachment protein, alpha]; NAT1 [N-acetyltransferase 1 (arylamine N-acetyltransferase)]; NAT2 [N-acetyltransferase 2 (arylamine N-acetyltransferase)]; NAT9 [N-acetyltransferase 9 (GCN5-related, putative)]; NBEA [neurobeachin]; NBN [nibrin]; NCAM1 [neural cell adhesion molecule 1]; NCF1 [neutrophil cytosolic factor 1]; NCF2 [neutrophil cytosolic factor 2]; NCF4 [neutrophil cytosolic factor 4, 40 kDa]; NCK1 [NCK adaptor protein 1]; NCL [nucleolin]; NCOA1 [nuclear receptor coactivator 1]; NCOA2 [nuclear receptor coactivator 2]; NCOR1 [nuclear receptor co-repressor 1]; NCR3 [natural cytotoxicity triggering receptor 3]; NDUFA13 [NADH dehydrogenase (ubiquinone) 1 alpha subcomplex, 13]; NDUFAB1 [NADH dehydrogenase (ubiquinone) 1, alpha/beta subcomplex, 1, 8 kDa]; NDUFAF2 [NADH dehydrogenase (ubiquinone) 1 alpha subcomplex, assembly factor 2]; NEDD4 [neural precursor cell expressed, developmentally down-regulated 4]; NEFL [neurofilament, light polypeptide]; NEFM [neurofilament, medium polypeptide]; NEGR1 [neuronal growth regulator 1]; NEK6 [NIMA (never in mitosis gene a)-related kinase 6]; NELF [nasal embryonic LHRH factor]; NELL1 [NEL-like 1 (chicken)]; NES [nestin]; NEU1 [sialidase 1 (lysosomal sialidase)]; NEUROD1 [neurogenic differentiation 1]; NF1 [neurofibromin 1]; NF2 [neurofibromin 2 (merlin)]; NFAT5 [nuclear factor of activated T-cells 5, tonicity-responsive]; NFATC1 [nuclear factor of activated T-cells, cytoplasmic, calcineurin-dependent 1]; NFATC2 [nuclear factor of activated T-cells, cytoplasmic, calcineurin-dependent 2]; NFATC4 [nuclear factor of activated T-cells, cytoplasmic, calcineurin-dependent 4]; NFE2L2 [nuclear factor (erythroid-derived 2)-like 2]; NFKB1 [nuclear factor of kappa light polypeptide gene enhancer in B-cells 1]; NFKB2 [nuclear factor of kappa light polypeptide gene enhancer in B-cells 2 (p49/pi 00)]; NFKB1A [nuclear factor of kappa light polypeptide gene enhancer in B-cells inhibitor, alpha]; NFKB1B [nuclear factor of kappa light polypeptide gene enhancer in B-cells inhibitor, beta]; NFKB1L1 [nuclear factor of kappa light polypeptide gene enhancer in B-cells inhibitor-like 1]; NFU1 [NFU1 iron-sulfur cluster scaffold homolog (S. cerevisiae)]; NGF [nerve growth factor (beta polypeptide)]; NGFR [nerve growth factor receptor (TNFR superfamily, member 16)]; NHEJ [nonhomologous end-joining factor 1]; NID1 [nidogen 1]; NKAP [NFkB activating protein]; NKX2-1, NK2 homeobox 1]; NKX2-3 [NK2 transcription factor related, locus 3 (Drosophila)]; NLRP3 [NLR family, pyrin domain containing 3]; NMB [neuromedin B]; NME1 [non-metastatic cells 1, protein (NM23A) expressed in]; NME2 [non-metastatic cells 2, protein (NM23B) expressed in]; NMU [neuromedin U]; NNAT [neuronatin]; NOD1 [nucleotide-binding oligomerization domain containing 1]; NOD2 [nucleotide-binding oligomerization domain containing 2]; NONO [non-POU domain containing, octamer-binding]; NOS1 [nitric oxide synthase 1 (neuronal)]; NOS2 [nitric oxide synthase 2, inducible]; NOS3 [nitric oxide synthase 3 (endothelial cell)]; NOTCH1 [Notch homolog 1, translocation-associated (Drosophila)]; NOTCH2 [Notch homolog 2 (Drosophila)]; NOTCH3 [Notch homolog 3 (Drosophila)]; NOTCH4 [Notch homolog 4 (Drosophila)]; NOX1 [NADPH oxidase 1]; NOX3 [NADPH oxidase 3]; NOX4 [NADPH oxidase 4]; NOX5 [NADPH oxidase, EF-hand calcium binding domain 5]; NPAT [nuclear protein, ataxia-telangiectasia locus]; NPC 1 [Niemann-Pick disease, type C1]; NPC1L1 [NPC1 (Niemann-Pick disease, type C1, gene)-like 1]; NPC2 [Niemann-Pick disease, type C2]; NPHP1 [nephronophthisis 1 Guvenile)]; NPHS1 [nephrosis 1, congenital. Finnish type (nephrin)]; NPHS2 [nephrosis 2, idiopathic, steroid-resistant (podocin)]; NPLOC4 [nuclear protein localization 4 homolog (S. cerevisiae)]; NPM1 [nucleophosmin (nucleolar phosphoprotein B23, numatrin)]; NPPA [natriuretic peptide precursor A]; NPPB [natriuretic peptide precursor B]; NPPC [natriuretic peptide precursor C]; NPR1 [natriuretic peptide receptor A/guanylate cyclase A (atrionatriuretic peptide receptor A)]; NPR3 [natriuretic peptide receptor C/guanylate cyclase C (atrionatriuretic peptide receptor C)]; NPS [neuropeptide S]; NPSR1 [neuropeptide S receptor 1]; NPY [neuropeptide Y]; NPY2R [neuropeptide Y receptor Y2]; NQ01 [NAD(P)H dehydrogenase, quinone 1]; NROB1 [nuclear receptor subfamily 0, group B, member 1]; NR1H2 [nuclear receptor subfamily 1, group H, member 2]; NR1H3 [nuclear receptor subfamily 1, group H, member 3]; NR1H4 [nuclear receptor subfamily 1, group H, member 4]; NR1I2 [nuclear receptor subfamily 1, group 1, member 2]; NR1 T3 [nuclear receptor subfamily 1, group T, member 3]; NR2F2 [nuclear receptor subfamily 2, group F, member 2]; NR3C1 [nuclear receptor subfamily 3, group C, member 1 (glucocorticoid receptor)]; NR3C2 [nuclear receptor subfamily 3, group C, member 2]; NR4A1 [nuclear receptor subfamily 4, group A, member 1]; NR4A3 [nuclear receptor subfamily 4, group A, member 3]; NR5A1 [nuclear receptor subfamily 5, group A, member 1]; NRF1 [nuclear respiratory factor 1]; NRG1 [neuregulin 1]; NRIP1 [nuclear receptor interacting protein 1]; NRTP2 [nuclear receptor interacting protein 2]; NRP1 [neuropilin 1]; NSD1 [nuclear receptor binding SET domain protein 1]; NSDHL [NAD(P) dependent steroid dehydrogenase-like]; NSF [N-ethylmaleimide-sensitive factor]; NT5E [5′-nucleotidase, ecto (CD73)]; NTAN1 [N-terminal asparagine amidase]; NTF3 [neurotrophin 3]; NTF4 [neurotrophin 4]; NTN1 [netrin 1]; NTRK1 [neurotrophic tyrosine kinase, receptor, type 1]; NTRK2 [neurotrophic tyrosine kinase, receptor, type 2]; NTRK3 [neurotrophic tyrosine kinase, receptor, type 3]; NTS [neurotensin]; NUCB2 [nucleobindin 2]; NUDT1 [nudix (nucleoside diphosphate linked moiety X)-type motif 1]; NUDT2 [nudix (nucleoside diphosphate linked moiety X)-type motif2]; NUDT6 [nudix (nucleoside diphosphate linked moiety X)-type motif6]; NUFIP2 [nuclear fragile X mental retardation protein interacting protein 2]; NUP98 [nucleoporin 98 kDa]; NXF1 [nuclear RNA export factor 1]; OCA2 [oculocutaneous albinism II]; OCLN [occludin]; ODC1 [ornithine decarboxylase 1]; OFD1 [oral-facial-digital syndrome 1]; OGDH [oxoglutarate (alpha-ketoglutarate) dehydrogenase (lipoamide)]; OGG1 [8-oxoguanine DNA glycosylase]; OGT [O-linked N-acetylglucosamine (GIcNAc) transferase (UDP-N-acetylglucosamine:polypeptide-N-acetylglucosaminyl transferase)]; OLR1 [oxidized low density lipoprotein (lectin-like) receptor 1]; OMP [olfactory marker protein]; ONECUT2 [one cut homeobox 2]; OPN3 [opsin 3]; OPRK1 [opioid receptor, kappa 1]; OPRM1 [opioid receptor, mu 1]; OPTN [optineurin]; OR2B1 [olfactory receptor, family 2, subfamily B, member 11]; ORMDL3 [ORM1-like 3 (S. cerevisiae)]; OSBP [oxysterol binding protein]; OSGIN2 [oxidative stress induced gro ih inhibitor family member 2]; OSM [oncostatin M]; OTC [ornithine carbamoyltransferase]; OTOP2 [otopetrin 2]; OTOP3 [otopetrin 3]; OTUD1 [OTU domain containing 1]; OXA1L [oxidase (cytochrome c) assembly 1-like]; OXER1 [oxoeicosanoid (OXE) receptor 1]; OXT [oxytocin, prepropeptide]; OXTR [oxytocin receptor]; P2RX7 [purinergic receptor P2X, ligand-gated ion channel, 7]; P2RY1 [purinergic receptor P2Y, G-protein coupled, 1]; P2RY12 [purinergic receptor P2Y, G-protein coupled, 12]; P2RY14 [purinergic receptor P2Y, G-protein coupled, 14]; P2RY2 [purinergic receptor P2Y, G-protein coupled, 2]; P4HA2 [proly14-hydroxylase, alpha polypeptide II]; P4HB [proly14-hydroxylase, beta polypeptide]; P4HTM [proly14-hydroxylase, transmembrane (endoplasmic reticulum)]; PABPC1 [poly(A) binding protein, cytoplasmic 1]; PACSIN3 [protein kinase C and casein kinase substrate in neurons 3]; PAEP [progestagen-associated endometrial protein]; PAFAH1B1 [platelet-activating factor acetylhydrolase 1b, regulatory subunit 1 (45 kDa)]; PAH [phenylalanine hydroxylase]; PAK1 [p21 protein (Cdc42/Rac)-activated kinase I]; PAK2 [p21 protein (Cdc42/Rac)-activated kinase 2]; PA10 [p21 protein (Cdc42/Rac)-activated kinase 3]; PAM [peptidylglycine alpha-amidating monooxygenase]; PAPPA [pregnancy-associated plasma protein A, pappalysin 1]; PARG [poly (ADP-ribose) glycohydrolase]; PARK2 [Parkinson disease (autosomal recessive, juvenile) 2, parkin]; PARP1 [poly (ADP-ribose) polymerase 1]; PAWR [PRKC, apoptosis, WT1, regulator]; PAX2 [paired box 2]; PAX3 [paired box 3]; PAX5 [paired box 5]; PAX6 [paired box 6]; PAXIP1 [PAX interacting (with transcription-activation domain) protein 1]; PC [pyruvate carboxylase]; PCCA [propionyl Coenzyme A carboxylase, alpha polypeptide]; PCCB [propionyl Coenzyme A carboxylase, beta polypeptide]; PCDH1 [protocadherin 1]; PCK1 [phosphoenolpyruvate carboxykinase 1 (soluble)]; PCM1 [pericentriolar material 1]; PCNA [proliferating cell nuclear antigen]; PCNT [pericentrin]; PCSK1 [proprotein convertase subtilisin/kexin type 1]; PCSK6 [proprotein convertase subtilisin/kexin type 6]; PCSK7 [proprotein convertase subtilisin/kexin type 7]; PCYT1A [phosphate cytidylyltransferase 1, choline, alpha]; PCYT2 [phosphate cytidylyltransferase 2, ethanolamine]; PDCD1 [programmed cell death 1]; PDCD1LG2 [programmed cell death 1 ligand 2]; PDCD6 [programmed cell death 6]; PDE3B [phosphodiesterase 3B, cGMP-inhibited]; PDE4A [phosphodiesterase 4A, cAMP-specific (phosphodiesterase E2 dunce homolog, Drosophila)]; PDE4B [phosphodiesterase 4B, cAMP-specific (phosphodiesterase E4 dunce homolog, Drosophila)]; PDE4D [phosphodiesterase 4D, cAMP-specific (phosphodiesterase E3 dunce homolog, Drosophila)]; PDE7A [phosphodiesterase 7A]; PDGFA [platelet-derived growth factor alpha polypeptide]; PDGFB [platelet-derived growth factor beta polypeptide (simian sarcoma viral (v-sis) oncogene homolog)]; PDGFRA [platelet-derived growth factor receptor, alpha polypeptide]; PDGFRB [platelet-derived growth factor receptor, beta polypeptide]; PDIA2 [protein disulfide isomerase family A, member 2]; PDIA3 [protein disulfide isomerase family A, member 3]; PDK1 [pyruvate dehydrogenase kinase, isozyme 1]; PDLIM1 [PDZ and LIM domain 1]; PDLIM5 [PDZ and LIM domain 5]; PDLIM7 [PDZ and LIM domain 7 (enigma)]; PDP1 [pyruvate dehyrogenase phosphatase catalytic subunit 1]; PDX1 [pancreatic and duodenal homeobox 1]; PDXK [pyridoxal (pyridoxine, vitamin B6) kinase]; PDYN [prodynorphin]; PECAM1 [platelet/endothelial cell adhesion molecule]; PEMT [phosphatidylethanolamine N-methyltransferase]; PENK [proenkephalin]; PEPD [peptidase D]; PER1 [period homolog 1 (Drosophila)]; PEX1 [peroxisomal biogenesis factor 1]; PEX1O [peroxisomal biogenesis factor 10]; PEX12 [peroxisomal biogenesis factor 12]; PEX13 [peroxisomal biogenesis factor 13]; PEX14 [peroxisomal biogenesis factor 14]; PEX16 [peroxisomal biogenesis factor 16]; PEX19 [peroxisomal biogenesis factor 19]; PEX2 [peroxisomal biogenesis factor 2]; PEX26 [peroxisomal biogenesis factor 26]; PEX3 [peroxisomal biogenesis factor 3]; PEX5 [peroxisomal biogenesis factor 5]; PEX6 [peroxisomal biogenesis factor 6]; PEX7 [peroxisomal biogenesis factor 7]; PF4 [platelet factor 4]; PFAS [phosphoribosylfonnylglycinamidine synthase]; PFDN4 [prefoldin subunit 4]; PFN1 [profilin 1]; PGC [progastricsin (pepsinogen C)]; PGD [phosphogluconate dehydrogenase]; PGF [placental growth factor]; PGK1 [phosphoglycerate kinase 1]; PGM1 [phosphoglucomutase 1]; PGR [progesterone receptor]; PHB [prohibitin]; PHEX [phosphate regulating endopeptidase homolog, X-linked]; PHF11 [PHD finger protein 11]; PHOX2B [paired-like homeobox 2b]; PHTF1 [putative homeodomain transcription factor 1]; PHYH [phytanoyl-CoA 2-hydroxylase]; PHYHIP [phytanoyl-CoA 2-hydroxylase interacting protein]; PI3 [peptidase inhibitor 3, skin-derived]; PIGA [phosphatidylinositol glycan anchor biosynthesis, class A]; PIGR [polymeric immunoglobulin receptor]; P1K3C2A [phosphoinositide-3-kinase, class 2, alpha polypeptide]; PIK3C2B [phosphoinositide-3-kinase, class 2, beta polypeptide]; PTK3C2G [phosphoinositide-3-kinase, class 2, gamma polypeptide]; PIK3C3 [phosphoinositide-3-kinase, class 3]; PIK3CA [phosphoinositide-3-kinase, catalytic, alpha polypeptide]; PIK3CB [phosphoinositide-3-kinase, catalytic, beta polypeptide]; PIK3CD [phosphoinositide-3-kinase, catalytic, delta polypeptide]; PIK3CG [phosphoinositide-3-kinase, catalytic, gamma polypeptide]; PIK3R1 [phosphoinositide-3-kinase, regulatory subunit 1 (alpha)]; PIK3R2 [phosphoinositide-3-kinase, regulatory subunit 2 (beta)]; PTK3R3 [phosphoinositide-3-kinase, regulatory subunit 3 (gamma)]; PIKFYVE [phosphoinositide kinase, FYVE finger containing]; PIN1 [peptidylprolyl cisitrans isomerase, NIMA-interacting 1]; PINK1 [PTEN induced putative kinase 1]; PIP [prolactin-induced protein]; PIP5KL1 [phosphatidylinositol-4-phosphate 5-kinase-like 1]; PITPNM 1 [phosphatidylinositol transfer protein, membrane-associated 1]; PITRM1 [pitrilysin metallopeptidase 1]; PITX2 [paired-like homeodomain 2]; PKD2 [polycystic kidney disease 2 (autosomal dominant)]; PKLR [pyruvate kinase, liver and RBC]; PKM2 [pyruvate kinase, muscle]; PKN1 [protein kinase N1]; PL-5283 [PL-5283 protein]; PLA2G1B [phospholipase A2, group 1B (pancreas)]; PLA2G2A [phospholipase A2, group IIA (platelets, synovial fluid)]; PLA2G2D [phospholipase A2, group 1iD]; PLA2G4A [phospholipase A2, group IVA (cytosolic, calcium-dependent)]; PLA2G6 [phospholipase A2, group VI (cytosolic, calcium-independent)]; PLA2G7 [phospholipase A2, group VII (platelet-activating factor acetylhydrolase, plasma)]; PLA2R1 [phospholipase A2 receptor 1, 180 kDa]; PLAT [plasminogen activator, tissue]; PLAU [plasminogen activator, urokinase]; PLAUR [plasminogen activator, urokinase receptor]; PLCB1 [phospholipase C, beta 1 (phosphoinositide-specific)]; PLCB2 [phospholipase C, beta 2]; PLCB4 [phospholipase C, beta 4]; PLCD1 [phospholipase C, delta 1]; PLCG1 [phospholipase C, gamma 1]; PLCG2 [phospholipase C, gamma 2 (phosphatidylinositol-specific)]; PLD1 [phospholipase D1, phosphatidylcholine-specific]; PLEC [plectin]; PLEK [pleckstrin]; PLG [plasminogen]; PLIN1 [perilipin 1]; PLK1 [polo-like kinase 1 (Drosophila)]; PLK2 [polo-like kinase 2 (Drosophila)]; PLK3 [polo-like kinase 3 (Drosophila)]; PLP1 [proteolipid protein 1]; PLTP [phospholipid transfer protein]; PMAIP1 [phorbol-12-myristate-13-acetate-induced protein 1]; PMCH [pro-melanin-concentrating hormone]; PML [promyelocytic leukemia]; PMP22 [peripheral myelin protein 22]; PMS2 [PMS2 postmeiotic segregation increased 2 (S. cerevisiae)]; PNLIP [pancreatic lipase]; PNMA3 [paraneoplastic antigen MA3]; PNMT [phenylethanolamine N-methyltransferase]; PNP [purine nucleoside phosphorylase]; POLB [polymerase (DNA directed), beta]; POLD3 [polymerase (DNA-directed), delta 3, accessmy subunit]; POLD4 [polymerase (DNA-directed), delta 4]; POLH [polymerase (DNA directed), eta]; POLL [polymerase (DNA directed), lambda]; POLR2A [polymerase (RNA) II (DNA directed) polypeptide A, 220 kDa]; POLR2B [polymerase (RNA) II (DNA directed) polypeptide B, 140 kDa]; POLR2c [polymerase (RNA) II (DNA directed) polypeptide C, 33 kDa]; POLR2D [polymerase (RNA) II (DNA directed) polypeptide D]; POLR2E [polymerase (RNA) II (DNA directed) polypeptide E, 25 kDa]; POLR2F [polymerase (RNA) II (DNA directed) polypeptide F]; POLR2G [polymerase (RNA) II (DNA directed) polypeptide G]; POLR2H [polymerase (RNA) 11 (DNA directed) polypeptide H]; POLR21 [polymerase (RNA) 11 (DNA directed) polypeptide 1, 14.5 kDa]; POLR2J [polymerase (RNA) 11 (DNA directed) polypeptide J, 13.3 kDa]; POLR2K [polymerase (RNA) 1T (DNA directed) polypeptide K, 7.0 kDa]; POLR2L [polymerase (RNA) (DNA directed) polypeptide L, 7.6 kDa]; POMC [proopiomelanocortin]; POMT1 [protein-O-mannosyltransferase 1]; PON1 [paraoxonase 1]; PON2 [paraoxonase 2]; PON3 [paraoxonase 3]; POSTN [periostin, osteoblast specific factor]; POT1 [POT1 protection oftelomeres 1 homolog (S. pombe)]; POU2AF1 [POU class 2 associating factor 1]; POU2F1 [POU class 2 homeobox 1]; POU2F2 [POU class 2 homeobox 2]; POU5F1 [POU class 5 homeobox 1]; PPA1 [pyrophosphatase (inorganic) 1]; PPARA [peroxisome proliferator-activated receptor alpha]; PPARD [peroxisome proliferator-activated receptor delta]; PPARG [peroxisome proliferator-activated receptor gamma]; PPARGCIA [peroxisome proliferator-activated receptor gamma, coactivator 1 alpha]; PPAT [phosphoribosyl pyrophosphate amidotransferase]; PPBP [pro-platelet basic protein (chemokine (C-X-C motif) ligand 7)]; PPFIA1 [protein tyrosine phosphatase, receptor type, fpolypeptide (PTPRF), interacting protein (liprin), alpha 1]; PPIA [peptidylprolyl isomerase A (cyclophilin A)]; PPIB [peptidylprolyl isomerase B (cyclophilin B)]; PPIG [peptidylprolyl isomerase G (cyclophilin G)]; PPDX [protoporphyrinogen oxidase]; PPPICB [protein phosphatase 1, catalytic subunit, beta isozyme]; PPP1R12A [protein phosphatase 1, regulatory (inhibitor) subunit 12A]; PPP1R2 [protein phosphatase 1, regulatory (inhibitor) subunit 2]; PPP2R1B [protein phosphatase 2, regulatory subunit A, beta]; PPP2R2B [protein phosphatase 2, regulatory subunit B, beta]; PPP2R4 [protein phosphatase 2A activator, regulatory subunit 4]; PPP6C [protein phosphatase 6, catalytic subunit]; PPT1 [palmitoyl-protein thioesterase 1]; PPY [pancreatic polypeptide]; PRDM1 [PR domain containing 1, with ZNF domain]; PRDM2 [PR domain containing 2, with ZNF domain]; PRDX2 [peroxiredoxin2]; PRDX3 [peroxiredoxin 3]; PRDX5 [peroxiredoxin 5]; PRF1 [perforin 1 (pore forming protein)]; PRG2 [proteoglycan 2, bone marrow (natural killer cell activator, eosinophil granule major basic protein)]; PRG4 [proteoglycan4]; PRIM1 [primase, DNA, polypeptide 1 (49 kDa)]; PRKAAI [protein kinase, AMP-activated, alpha 1 catalytic subunit]; PRKAA2 [protein kinase, AMP-activated, alpha 2 catalytic subunit]; PRKAB 1 [protein kinase, AMP-activated, beta 1 non-catalytic subunit]; PRKACA [protein kinase, cAMP-dependent, catalytic, alpha]; PRKACB [protein kinase, cAMP-dependent, catalytic, beta]; PRKACG [protein kinase, cAMP-dependent, catalytic, gamma]; PRKAR1A [protein kinase, cAMP-dependent, regulatory, type I, alpha (tissue specific extinguisher 1)]; PRKAR2A [protein kinase, cAMP-dependent, regulatory, type II, alpha]; PRKAR2B [protein kinase, cAMP-dependent, regulatory, type II, beta]; PRKCA [protein kinase C, alpha]; PRKCB [protein kinase C, beta]; PRKCD [protein kinase C, delta]; PRKCE [protein kinase C, epsilon]; PRKCG [protein kinase C, gamma]; PRKCH [protein kinase C, eta]; PRKCI [protein kinase C, iota]; PRKCQ [protein kinase C, theta]; PRKCZ [protein kinase C, zeta]; PRKD1 [protein kinase D1]; PRKD3 [protein kinase D3]; PRKDC [protein kinase, DNA-activated, catalytic polypeptide; also known as DNAPK]; PRKG1 [protein kinase, cGMP-dependent, type I]; PRKRIR [protein-kinase, interferon-inducible double stranded RNA dependent inhibitor, repressor of (P58 repressor)]; PRL [prolactin]; PRLR [prolactin receptor]; PRNP [prion protein]; PROC [protein C (inactivator of coagulation factors Va and VIIIa)]; PRODH [proline dehydrogenase (oxidase) 1]; PROK1 [prokineticin 1]; PROK2 [prokineticin 2]; PROM1 [prominin 1]; PR051 [proteinS (alpha)]; PRPH [peripherin]; PRSS1 [protease, serine, 1 (trypsin 1)]; PRSS2 [protease, serine, 2 (trypsin 2)]; PRSS2 [protease, serine, 21 (testisin)]; PRSS3 [protease, serine, 3]; PRTN3 [proteinase 3]; PSAP [prosaposin]; PSEN1 [presenilin 1]; PSEN2 [presenilin 2 (Alzheimer disease 4)]; PSMA1 [proteasome (prosome, macropain) subunit, alpha type, 1]; PSMA2 [proteasome (prosome, macropain) subunit, alpha type, 2]; PSMA3 [proteasome (prosome, macropain) subunit, alpha type, 3]; PSMA5 [proteasome (prosome, macropain) subunit, alpha type, 5]; PSMA6 [proteasome (prosome, macropain) subunit, alpha type, 6]; PSMA7 [proteasome (prosome, macropain) subunit, alpha type, 7]; PSMB10 [proteasome (prosome, macropain) subunit, beta type, 10]; PSMB2 [proteasome (prosome, macropain) subunit, beta type, 2]; PSMB4 [proteasome (prosome, macropain) subunit, beta type, 4]; PSMB5 [proteasome (prosome, macropain) subunit, beta type, 5]; PSMB6 [proteasome (prosome, macropain) subunit, beta type, 6]; PSMB8 [proteasome (prosome, macropain) subunit, beta type, R (large multifunctional peptidase 7)]; PSMB9 [proteasome (prosome, macropain) subunit, beta type, 9 (large multifunctional peptidase 2)]; PSMC3 [proteasome (prosome, macropain) 26S subunit, ATPasc, 3]; PSMC4 [protcasome (prosome, macropain) 26S subunit, ATPase, 4]; PSMC6 [proteasome (prosome, macropain) 26S subunit, ATPase, 6]; PSMD4 [proteasome (prosome, macropain) 26S subunit, non-ATPase, 4]; PSMD9 [proteasome (prosome, macropain) 26S subunit, non-ATPase, 9]; PSME1 [proteasome (prosome, macropain) activator subunit 1 (PA28 alpha)]; PSME3 [proteasome (prosome, macropain) activator subunit 3 (PA28 gamma; Ki)]; PSMG2 [proteasome (prosome, macropain) assembly chaperone 2]; PSORS1C1 [psoriasis susceptibility 1 candidate 1]; PSTPIP1 [proline-serine-threonine phosphatase interacting protein 1]; PTAFR [platelet-activating factor receptor]; PTBPI [polypyrimidine tract binding protein 1]; PTCH1 [patched homolog 1 (Drosophila)]; PTEN [phosphatase and tensin homolog]; PTGDR [prostaglandin D2 receptor (DP)]; PTGDS [prostaglandin D2 synthase 21 kDa (brain)]; PTGER1 [prostaglandin E receptor 1 (subtype EPI), 42 kDa]; PTGER2 [prostaglandin E receptor 2 (subtype EP2), 53 kDa]; PTGER3 [prostaglandin E receptor 3 (subtype EP3)]; PTGER4 [prostaglandin E receptor 4 (subtype EP4)]; PTGES [prostaglandin E synthase]; PTGFR [prostaglandin F receptor (FP)]; PTGIR [prostaglandin 12 (prostacyclin) receptor (IP)]; PTGS1 [prostaglandin-endoperoxide synthase 1 (prostaglandin G/H synthase and cyclooxygenase)]; PTGS2 [prostaglandin-endoperoxide synthase 2 (prostaglandin G/H synthase and cyclooxygenase)]; PTH [parathyroid hormone]; PTHLH [parathyroid hormone-like hormone]; PTK2 [PTK2 protein tyrosine kinase 2]; PTK2B [PTK2B protein tyrosine kinase 2 beta]; PTK7 [PTK7 protein tyrosine kinase 7]; PTMS [parathymosin]; PTN [pleiotrophin]; PTPN1 [protein tyrosine phosphatase, non-receptor type 1]; PTPN11 [protein tyrosine phosphatase, non-receptor type 11]; PTPN12 [protein tyrosine phosphatase, non-receptor type 12]; PTPN2 [protein tyrosine phosphatase, non-receptor type 2]; PTPN22 [protein tyrosine phosphatase, non-receptor type 22 (lymphoid)]; PTPN6 [protein tyrosine phosphatase, non-receptor type 6]; PTPRC [protein tyrosine phosphatase, receptor type, C]; PTPRD [protein tyrosine phosphatase, receptor type, D]; PTPRE [protein tyrosine phosphatase, receptor type, E]; PTPRJ [protein tyrosine phosphatase, receptor type, J]; PTPRN [protein tyrosine phosphatase, receptor type, N]; PTPRT [protein tyrosine phosphatase, receptor type, T]; PTPRU [protein tyrosine phosphatase, receptor type, U]; PTRF [polymerase 1 and transcript release factor]; PTS [6-pyruvoyltetrahydropterin synthase]; PTTG1 [pituitary tumor-transforming 1]; PTX3 [pentraxin 3, long]; PUS10 [pseudouridylate synthase 10]; PXK [PX domain containing serine/threonine kinase]; PXN [paxillin]; PYCR1 [pyrroline-5-carboxylate reductase 1]; PYCR2 [pyrroline-5-carboxylate reductase family, member 2]; PYGB [phosphorylase, glycogen; brain]; PYGM [phosphorylase, glycogen, muscle]; PYY [peptide YY]; PZP [pregnancy-zone protein]; QDPR [quinoid dihydropteridine reductase]; RAB11 A [RAB11A, member RAS oncogene family]; RAB11FIP1 [RAB111 family interacting protein 1 (class 1)]; RAB27A [RAB27A, member RAS oncogene family]; RAB37 [RAB37, member RAS oncogene family]; RAB39 [RAB39, member RAS oncogene family]; RAB7A [RAB7A, member RAS oncogene family]; RAB9A [RAB9A, member RAS oncogene family]; RAC1 [ras-related C3 botulinum toxin substrate 1 (rho family, small GTP binding protein Rac1)]; RAC2 [ras-related C3 botulinum toxin substrate 2 (rho family, small GTP binding protein Rac2)]; RAD17 [RAD17 homolog (S. pombe)]; RAD50 [RAD50 homolog (S. cerevisiae)]; RAD51 [RAD51 homolog (RecA homolog, E. coli) (S. cerevisiae)]; RAD51C [RAD51 homolog C (S. cerevisiae)]; RAD51L [RAD51-like 1 (S. cerevisiae)]; RAD51L3 [RAD51-like 3 (S. cerevisiae)]; RAD54L [RAD54-like (S. cerevisiae)]; RAD9A [RAD9 homolog A (S. pombe)]; RAF1 [v-raf-1 murine leukemia viral oncogene homolog 1]; RAG1 [recombination activating gene 1]; RAC2 [recombination activating gene 2]; RAN [RAN, member RAS oncogene family]; RANBP1 [RAN binding protein 1]; RAP1A [RAP1A, member ofRAS oncogene family]; RAPGEF4 [Rap guanine nucleotide exchange factor (GEF) 4]; RARA [retinoic acid receptor, alpha]; RARB [retinoic acid receptor, beta]; RARG [retinoic acid receptor, gamma]; RARRES2 [retinoic acid receptor responder (tazarotene induced) 2]; RARS [arginyl-tRNA synthetase]; RASA1 [RAS p21 protein activator (GTPase activating protein) 1]; RASGRP1 [RAS guanyl releasing protein 1 (calcium and DAG-regulated)]; RASGRP2 [RAS guanyl releasing protein 2 (calcium and DAG-regulated)]; RASGRP4 [RAS guanyl releasing protein 4]; RASSF1 [Ras association (RalGDS/AF-6) domain family member 1]; RB1 [retinoblastoma 1]; RBBP4 [retinoblastoma binding protein 4]; RBBP8 [retinoblastoma binding protein 8]; RBL1 [retinoblastoma-like 1 (p107)]; RBL2 [retinoblastoma-like 2 (p130)]; RBP4 [retinol binding protein 4, plasma]; RBX1 [ring-box 1]; RCBTB 1 [regulator of chromosome condensation (RCC1) and BTB (POZ) domain containing protein 1]; RCN1 [reticulocalbin 1, EF-hand calcium binding domain]; RCN2 [reticulocalbin 2, EF-hand calcium binding domain]; RDX [radixin]; RECK [reversion-inducing-cysteine-rich protein with kazal motifs]; RECQL [RecQ protein-like (DNA helicase Q1-like)]; RECQL4 [RecQ protein-like 4]; RECQL5 [RecQ protein-like 5]; REG1A [regenerating islet-derived 1 alpha]; REG3A [regenerating islet-derived 3 alpha]; REG4 [regenerating islet-derived family, member 4]; REL [v-rel reticuloendotheliosis viral oncogene homolog (avian)]; RELA [v-rel reticuloendotheliosis viral oncogene homolog A (avian)]; RELB [v-rel reticuloendotheliosis viral oncogene homolog B]; REN [renin]; RET [ret proto-oncogene]; RETN [resistin]; RETNLB [resistin like beta]; RFC [replication factor C (activator 1) 1, 145 kDa]; RFC2 [replication factor C (activator 1) 2, 40 kDa]; RFC3 [replication factor C (activator 1) 3, 38 kDa]; RFX1 [regulatory factor X, 1 (influences HLA class 11 expression)]; RFX5 [regulatory factor X, 5 (influences HLA class 1T expression)]; RFXANK [regulatory factor X-associated ankyrin-containing protein]; RFXAP [regulatory factor X-associated protein]; RGS 18 [regulator of G-protein signaling 18]; RHAG [Rh-associated glycoprotein]; RHO [Rh blood group, D antigen]; RHO [rhodopsin]; RHOA [ras homolog gene family, member A]; RHOD [ras homolog gene family, member D]; RIF1 [RAP1 interacting factor homolog (yeast)]; RIPK1 [receptor (TNFRSF)-interacting serine-threonine kinase 1]; RIPK2 [receptor-interacting serine-threonine kinase 2]; RLBP 1 [retinaldehyde binding protein 1]; RLN1 [relaxin 1]; RLN2 [relaxin 2]; RMT1 [RMi1, RecQ mediated genome instability 1, homolog (S. cerevisiae)]; RNASE1 [ribonuclease, RNase A family, 1 (pancreatic)]; RNASE2 [ribonuclease, RNase A family, 2 (liver, eosinophil-derived neurotoxin)]; RNASE3 [ribonuclease, RNase A family, 3 (cosinophil cationic protein)]; RNASEH1 [ribonuclease H1]; RNASEH2A [ribonuclease H2, subunit A]; RNASEL [ribonuclease L (2′ [5′-oligoisoadenylate synthetase-dependent)]; RNASEN [ribonuclease type III, nuclear]; RNF123 [ring finger protein 123]; RNF13 [ring finger protein 13]; RNF135 [ring finger protein 135]; RNFI38 [ring finger protein 138]; RNF4 [ring finger protein 4]; RNH1 [ribonuclease/angiogenin inhibitor 1]; RNPC3 [RNA-binding region (RNP1, RRM) containing 3]; RNPEP [arginyl aminopeptidase (aminopeptidase B)]; ROCK1 [Rho-associated, coiled-coil containing protein kinase 1]; ROM1 [retinal outer segment membrane protein 1]; ROR2 [receptor tyrosine kinase-like orphan receptor 2]; RORA [RAR-related orphan receptor A]; RPA1 [replication protein A1, 70 kDa]; RPA2 [replication protein A2, 32 kDa]; RPGRIP1L [RPGRIP1-like]; RPLP1 [ribosomal protein, large, P1]; RPS19 [ribosomal protein S19]; RPS6KA3 [ribosomal protein S6 kinase, 90 kDa, polypeptide 3]; RPS6KB1 [ribosomal protein S6 kinase, 70 kDa, polypeptide 1]; RPSA [ribosomal protein SA]; RRBP1 [ribosome binding protein 1 homolog 180 kDa (dog)]; RRM1 [ribonucleotide reductase M1]; RRM2B [ribonucleotide reductase M2B (TP53 inducible)]; RUNX1 [runt-related transcription factor 1]; RUNX3 [runt-related transcription factor 3]; RXRA [retinoid X receptor, alpha]; RXRB [retinoid X receptor, beta]; RYR1 [ryanodine receptor 1 (skeletal)]; RYR3 [ryanodine receptor 3]; S100A1 [S100 calcium binding protein A1]; S100A12 [S100 calcium binding protein A12]; S100A4 [S100 calcium binding protein A4]; S100A7 [S100 calcium binding protein A7]; S100A8 [S100 calcium binding protein A8]; S100A9 [S100 calcium binding protein A9]; S100B [S100 calcium binding protein B]; S100G [S100 calcium binding protein G]; SIPR1 [sphingosine-1-phosphate receptor 1]; SAA1 [serum amyloid A1]; SAA4 [serum amyloid A4, constitutive]; SAFB [scaffold attachment factor B]; SAG [S-antigen; retina and pineal gland (arrestin)]; SAGE1 [sarcoma antigen 1]; SARDH [sarcosine dehydrogenase]; SART3 [squamous cell carcinoma antigen recognized by T cells 3]; SBDS [Shwachman-Bodian-Diamond syndrome]; SBNO2 [strawberry notch homolog 2 (Drosophila)]; SCAMP3 [secretory carrier membrane protein 3]; SOAP [SREBF chaperone]; SCARB1 [scavenger receptor class B, member 1]; SCD [stearoyl-CoA desaturase (delta-9-desaturase)]; SCG2 [secretogranin 11]; SCG3 [secretogranin III]; SCG5 [secretogranin V (7B2 protein)]; SCGB1A1 [secretoglobin, family 1A, member 1 (uteroglobin)]; SCGB3A2 [secretoglobin, family 3A, member 2]; SCN4A [sodium channel, voltage-gated, type N, alpha subunit]; SCNN1A [sodium channel, nonvoltage-gated 1 alpha]; SCNN1G [sodium channel, nonvoltage-gated 1, gamma]; SCO1 [SCO cytochrome oxidase deficient homolog 1 (yeast)]; SC02 [SCO cytochrome oxidase deficient homolog 2 (yeast)]; SCP2 [sterol carrier protein 2]; SCT [secretin]; SDC1 [syndecan 1]; SDC2 [syndecan 2]; SDC4 [syndecan 4]; SDHB [succinate dehydrogenase complex, subunit B, iron sulfur (Ip)]; SDHD [succinate dehydrogenase complex, subunit D, integral membrane protein]; SEC14L2 [SEC14-like 2 (S. cerevisiae)]; SEC16A [SEC16 homolog A (S. cerevisiae)]; SEC23B [Sec23 homolog B (S. cerevisiae)]; SELE [selectin E]; SELL [selectin L]; SELP [selectin P (granule membrane protein 140 kDa, antigen CD62)]; SELPLG [selectin P ligand]; SEPT5 [septin 5]; SEPP1 [selenoprotein P, plasma, 1]; SEPSECS [Sep (0-phosphoserine) tRNA:Sec (selenocysteine) tRNA synthase]; SERBP1 [SERPINE1 mRNA binding protein 1]; SERPINA1 [serpin peptidase inhibitor, clade A (alpha-1 antiproteinase, antitrypsin), member 1]; SERPINA2 [serpin peptidase inhibitor, clade A (alpha-1 antiproteinase, antitrypsin), member 2]; SERPINA3 [serpin peptidase inhibitor, clade A (alpha-1 antiproteinase, antitrypsin), member 3]; SERPINA5 [serpin peptidase inhibitor, clade A (alpha-1 antiproteinase, antitrypsin), member 5]; SERPINA6 [serpin peptidase inhibitor, clade A (alpha-1 antiproteinase, antitrypsin), member 6]; SERPINA7 [serpin peptidase inhibitor, clade A (alpha-1 antiproteinase, antitrypsin), member 7]; SERPINB1 [serpin peptidase inhibitor, clade B (ovalbumin), member 1]; SERPINB2 [serpin peptidase inhibitor, clade B (ovalbumin), member 2]; SERPINB3 [serpin peptidase inhibitor, clade B (ovalbumin), member 3]; SERPINB4 [serpin peptidase inhibitor, clade B (ovalbumin), member 4]; SERPINB5 [serpin peptidase inhibitor, clade B (ovalbumin), member 5]; SERPINB6 [serpin peptidase inhibitor, clade B (ovalbumin), member 6]; SERPINB9 [serpin peptidase inhibitor, clade B (ovalbumin), member 9]; SERPINC1 [serpin peptidase inhibitor, clade C (antithrombin), member 1]; SERPIND1 [serpin peptidase inhibitor, clade D (heparin cofactor), member 1]; SERPINE1 [serpin peptidase inhibitor, clade E (nexin, plasminogen activator inhibitor type 1), member 1]; SERPINE2 [serpin peptidase inhibitor, clade E (nexin, plasminogen activator inhibitor type 1), member 2]; SERPINF2 [serpin peptidase inhibitor, clade F (alpha-2 antiplasmin, pigment epithelium derived factor), member 2]; SERPING1 [serpin peptidase inhibitor, clade G (C1 inhibitor), member 1]; SERPINH1 [serpin peptidase inhibitor, clade H (heat shock protein 47), member 1, (collagen binding protein 1)]; SET [SET nuclear oncogene]; SETDB2 [SET domain, bifurcated 2]; SETX [senataxin]; SFPQ [splicing factor proline/glutamine-rich (polypyrimidine tract binding protein associated)]; SFRP1 [secreted frizzled-related protein 1]; SFRP2 [secreted frizzled-related protein 2]; SFRP5 [secreted frizzled-related protein 5]; SFTPA1 [surfactant protein A1]; SFTPB [surfactant protein B]; SFTPC [surfactant protein C]; SFTPD [surfactant protein D]; SGCA [sarcoglycan, alpha (50 kDa dystrophin-associated glycoprotein)]; SGCB [sarcoglycan, beta (43 kDa dystrophin-associated glycoprotein)]; SGK1 [serum/glucocorticoid regulated kinase 1]; SGSH [N-sulfoglucosamine sulfohydrolase]; SGTA [small glutamine-rich tetratricopeptide repeat (TPR)-containing, alpha]; SH2B1 [SH2B adaptor protein 1]; SH2B3 [SH2B adaptor protein 3]; SH2D1A [SH2 domain containing IA]; SH2D4B [SH2 domain containing 4B]; SH3KBP1 [SH3-domain kinase binding protein 1]; SHBG [sex hormone-binding globulin]; SHC1 [SHC (Src homology 2 domain containing) transforming protein 1]; SHH [sonic hedgehog homolog (Drosophila)]; SHMT2 [serine hydroxymethyltransferase 2 (mitochondrial)]; S1 [sucrase-isomaltase (alpha-glucosidase)]; STGTRR [single immunoglobulin and toll-interleukin 1 receptor (TTR) domain]; STP1 [survival of motor neuron protein interacting protein 1]; SIPA1 [signal-induced proliferation-associated 1]; SIRPA [signal-regulatory protein alpha]; SIRPB2 [signal-regulatory protein beta 2]; SIRT1 [sirtuin (silent mating type information regulation 2 homolog) 1 (S. cerevisiae)]; SKIV2L [superkiller viralicidic activity 2-like (S. cerevisiae)]; SKP2 [S-phase kinase-associated protein 2 (p45)]; SLAMF1 [signaling lymphocytic activation molecule family member 1]; SLAMF6 [SLAM family member 6]; SLC11A1 [solute carrier family 11 (proton-coupled divalent metal ion transporters), member 1]; SLC11A2 [solute carrier family 11 (proton-coupled divalent metal ion transporters), member 2]; SLC12A1 [solute carrier family 12 (sodium/potassium/chloride transporters), member 1]; SLC12A2 [solute carrier family 12 (sodium/potassium/chloride transporters), member 2]; SLC14A1 [solute carrier family 14 (urea transporter), member 1 (Kidd blood group)]; SLC15A1 [solute carrier family 15 (oligopeptide transporter), member 1]; SLC16A1 [solute carrier family 16, member 1 (monocarboxylic acid transporter 1)]; SLC17A5 [solute carrier family 17 (anion/sugar transporter), member 5]; SLC17A6 [solute carrier family 17 (sodium-dependent inorganic phosphate cotransporter), member 6]; SLC17A7 [solute carrier family 17 (sodium-dependent inorganic phosphate cotransporter), member 7]; SLC19A1 [solute carrier family 19 (folate transporter), member 1]; SLC1 A1 [solute carrier family 1 (neurona 1′epithelial high affinity glutamate transporter, system Xag), member 1]; SLC1A2 [solute carrier family 1 (glial high affinity glutamate transporter), member 2]; SLC1A4 [solute carrier family 1 (glutamate/neutral amino acid transporter), member 4]; SLC22A12 [solute carrier family 22 (organic anion/urate transporter), member 12]; SLC22A2 [solute carrier family 22 (organic cation transporter), member 2]; SLC22A23 [solute carrier family 22, member 23]; SLC22A3 [solute carrier family 22 (extraneuronal monoamine transporter), member 3]; SLC22A4 [solute carrier family 22 (organic cation/ergothioneine transporter), member 4]; SLC22A5 [solute carrier family 22 (organic cation/camitine transporter), member 5]; SLC22A6 [solute carrier family 22 (organic anion transporter), member 6]; SLC24A2 [solute carrier family 24 (sodium/potassium/calcium exchanger), member 2]; SLC25A1 [solute carrier family 25 (mitochondrial carrier; citrate transporter), member 1]; SLC25A20 [solute carrier family 25 (camitine/acylcamitine translocase), member 20]; SLC25A3 [solute carrier family 25 (mitochondrial carrier; phosphate carrier), member 3]; SLC25A32 [solute carrier family 25, member 32]; SLC25A33 [solute carrier family 25, member 33]; SLC25A4 [solute carrier family 25 (mitochondrial carrier; adenine nucleotide translocator), member 4]; SLC26A4 [solute carrier family 26, member 4]; SLC27A4 [solute carrier family 27 (fatty acid transporter), member 4]; SLC28A1 [solute carrier family 28 (sodium-coupled nucleoside transporter), member 1]; SLC2A1 [solute carrier family 2 (facilitated glucose transporter), member 1]; SLC2A13 [solute carrier family 2 (facilitated glucose transporter), member 13]; SLC2A3 [solute carrier family 2 (facilitated glucose transporter), member 3]; SLC2A4 [solute carrier family 2 (facilitated glucose transporter), member 4]; SLC30A1 [solute carrier family 30 (zinc transporter), member 1]; SLC30A8 [solute carrier family 30 (zinc transporter), member 8]; SLC31A1 [solute carrier family 31 (copper transporters), member 1]; SLC35A1 [solute carrier family 35 (CMP-sialic acid transporter), member A1]; SLC35A2 [solute carrier family 35 (UDP-galactose transporter), member A2]; SLC35C1 [solute carrier family 35, member C1]; SLC35F2 [solute carrier family 35, member F2]; SLC39A3 [solute carrier family 39 (zinc transpmier), member 3]; SLC3A2 [solute carrier family 3 (activators of dibasic and neutral amino acid transport), member 2]; SLC46A1 [solute carrier family 46 (folate transporter), member 1]; SLC5A5 [solute carrier family 5 (sodium iodide symporter), member 5]; SLC6A11 [solute carrier family 6 (neurotransmitter transporter, GABA), member 11]; SLC6A14 [solute carrier family 6 (amino acid transporter), member 14]; SLC6A19 [solute carrier family 6 (neutral amino acid transporter), member 19]; SLC6A3 [solute carrier family 6 (neurotransmitter transporter, dopamine), member 3]; SLC6A4 [solute carrier family 6 (neurotransmitter transporter, serotonin), member 4]; SLC6A8 [solute carrier family 6 (neurotransmitter transpmier, creatine), member 8]; SLC7A1 [solute carrier family 7 (cationic amino acid transporter, y+ system), member 1]; SLC7A2 [solute carrier family 7 (cationic amino acid transporter, y+ system), member 2]; SLC7A4 [solute carrier family 7 (cationic amino acid transporter, y+ system), member 4]; SLC7AS [solute carrier family 7 (cationic amino acid transporter, y+ system), member 5]; SLC8A1 [solute carrier family 8 (sodium/calcium exchanger), member 1]; SLC9A1 [solute carrier family 9 (sodium/hydrogen exchanger), member 1]; SLC9A3R1 [solute carrier family 9 (sodium/hydrogen exchanger), member 3 regulator 1]; SLCO1A2 [solute carrier organic anion transporter family, member 1A2]; SLCO1B1 [solute carrier organic anion transporter family, member 1B1]; SLCO1B3 [solute carrier organic anion transporter family, member 1B3]; SLPI [secretory leukocyte peptidase inhibitor]; SMAD1 [SMAD family member 1]; SMAD2 [SMAD family member 2]; SMAD3 [SMAD family member 3]; SMAD4 [SMAD family member 4]; SMAD7 [SMAD family member 7]; SMARCA4 [SWI/SNF related, matrix associated, actin dependent regulator of chromatin, subfamily a, member 4]; SMARCAL1 [SWI/SNF related, matrix associated, actin dependent regulator of chromatin, subfamily α-like 1]; SMARCB1 [SWL/SNF related, matrix associated, actin dependent regulator of chromatin, subfamilyb, member 1]; SMC1A [structural maintenance of chromosomes IA]; SMC3 [structural maintenance of chromosomes 3]; SMG1 [SMG1 homolog, phosphatidylinositol 3-kinase-related kinase (C. elegans)]; SMN1 [survival of motor neuron 1, telomeric]; SMPD1 [sphingomyelin phosphodiesterase 1, acid lysosomal]; SMPD2 [sphingomyelin phosphodiesterase 2, neutral membrane (neutral sphingomyelinase)]; SMTN [smoothelin]; SNA12 [snail homolog 2 (Drosophila)]; SNAP25 [synaptosomal-associated protein, 25 kDa]; SNCA [synuclein, alpha (non A4 component of amyloid precursor)]; SNCG [synuclein, gamma (breast cancer-specific protein 1)]; SNURF [SNRPN upstream reading frame]; SNW1 [SNW domain containing 1]; SNX9 [sorting nexin 9]; SOAT [sterol 0-acyltransferase 1]; SOCS1 [suppressor of cytokine signaling 1]; SOCS2 [suppressor of cytokine signaling 2]; SOCS3 [suppressor of cytokine signaling 3]; SOD [superoxide dismutase 1, soluble]; SOD2 [superoxide dismutase 2, mitochondrial]; SORBS3 [sorbin and SH3 domain containing 3]; SORD [sorbitol dehydrogenase]; SOX2 [SRY (sex determining region Y)-box 2]; SP1 [Sp1 transcription factor]; SP110 [SP11 0 nuclear body protein]; SP3 [Sp³ transcription factor]; SPA 17 [sperm autoantigenic protein 17]; SPARC [secreted protein, acidic, cysteine-rich (osteonectin)]; SPHK1 [sphingosine kinase 1]; SP11 [spleen focus forming virus (SFFV) proviral integration oncogene spil]; SPINK1 [serine peptidase inhibitor, Kazal type I]; SPTNK13 [serine peptidase inhibitor, Kazal type 13 (putative)]; SPINK5 [serine peptidase inhibitor, Kazal type S]; SPN [sialophorin]; SPON1 [spondin 1, extracellular matrix protein]; SPP1 [secreted phosphoprotein 1]; SPRED1 [sprouty-related, EVH1 domain containing 1]; SPRR2A [small proline-rich protein 2A]; SPRR2B [small proline-rich protein 2B]; SPTB [spectrin, beta, erythrocytic]; SRC [v-src sarcoma (Schmidt-Ruppin A-2) viral oncogene homolog (avian)]; SRDSA1 [steroid-S-alpha-reductase, alpha polypeptide 1 (3-oxo-S alpha-steroid delta 4-dehydrogenase alpha 1)]; SREBF1 [sterol regulatory element binding transcription factor 1]; SREBF2 [sterol regulatory element binding transcription factor 2]; SRF [serum response factor (c-fos serum response element-binding transcription factor)]; SRGN [serglycin]; SRP9 [signal recognition particle 9 kDa]; SRPX [sushi-repeat-containing protein, X-linked]; SRR [serine racemase]; SRY [sex determining region Y]; SSB [Sjogren syndrome antigen B (autoantigen La)]; SST [somatostatin]; SSTR2 [somatostatin receptor 2]; SSTR4 [somatostatin receptor 4]; STRSIA4 [STR alpha-N-acetyl-neuraminide alpha-2,8-sialyltransferase 4]; STAR [steroidogenic acute regulatory protein]; STAT1 [signal transducer and activator of transcription 1, 91 kDa]; STAT2 [signal transducer and activator of transcription 2, 113 kDa]; STAT3 [signal transducer and activator of transcription 3 (acute-phase response factor)]; STAT4 [signal transducer and activator of transcription 4]; STATSA [signal transducer and activator of transcription SA]; STATSB [signal transducer and activator of transcription SB]; STAT6 [signal transducer and activator of transcription 6, interlenkin-4 induced]; STELLAR [germ and embryonic stem cell enriched protein STELLA]; STIM1 [stromal interaction molecule 1]; STIP1 [stress-induced-phosphoprotein 1]; STK11 [serine/threonine kinase 11]; STMN2 [tathmin-like 2]; STRAP [serine/threonine kinase receptor associated protein]; STRC [stereocilin]; STS [steroid sulfatase (microsomal), isozyme S]; STX6 [syntaxin 6]; STX8 [syntaxin 8]; SULT1A1 [sulfotransferase family, cytosolic, 1A, phenol-preferring, member 1]; SULT1A3 [sulfotransferase family, cytosolic, 1A, phenol-preferring, member 3]; SUMF1 [sulfatase modifying factor 1]; SUM01 [SMT3 suppressor ofmiftwo 3 homolog 1 (S. cerevisiae)]; SUM03 [SMT3 suppressor ofmiftwo 3 homolog 3 (S. cerevisiae)]; SUOX [sulfite oxidase]; SUV39H1 [suppressor ofvariegation 3-9 homolog 1 (Drosophila)]; SWAP70 [SWAP switching B-cell complex 70 kDa subunit]; SYCP3 [synaptonemal complex protein 3]; SYK [spleen tyrosine kinase]; SYNM [synemin, intermediate filament protein]; SYNPO [synaptopodin]; SYNPO2 [synaptopodin 2]; SYP [synaptophysin]; SYT3 [synaptotagmin III]; SYTL1 [synaptotagmin-like 1]; T [T, brachyury homolog (mouse)]; TAC [tachykinin, precursor 1]; TAC4 [tachykinin 4 (hemokinin)]; TACR1 [tachykinin receptor 1]; TACR2 [tachykinin receptor 2]; TACR3 [tachykinin receptor 3]; TAGLN [transgelin]; TAL1 [T-cell acute lymphocytic leukemia 1]; TAOK3 [TAO kinase 3]; TAP1 [transporter 1, ATP-binding cassette, sub-family B (MDR/TAP)]; TAP2 [transporter 2, ATP-binding cassette, sub-family B (MDR/TAP)]; TARDBP [TAR DNA binding protein]; TARP [TCR gamma alternate reading frame protein]; TAT [tyrosine aminotransferase]; TBK1 [TANK-binding kinase 1]; TBP [TATA box binding protein]; TBX1 [T-box 1]; TBX2 [T-box 2]; TBX21 [T-box 21]; TBX3 [T-box 3]; TBX5 [T-box 5]; TBXA2R [thromboxane A2 receptor]; TBXAS1 [thromboxane A synthase 1 (platelet)]; TCEA1 [transcription elongation factor A (S11), 1]; TCEAL1 [transcription elongation factor A (S11)-like 1]; TCF4 [transcription factor 4]; TCF7L2 [transcription factor 7-like 2 (T-cell specific, HMG-box)]; TCL1 A [T-cell leukemia/lymphoma 1A]; TCL1B [T-cellleukemiallymphoma 1B]; TCN1 [transcobalamin I (vitamin B12 binding protein, R binder family)]; TCN2 [transcobalamin II; macrocytic anemia]; TDP1 [tyrosyl-DNA phosphodiesterase 1]; TEC [tee protein tyrosine kinase]; TECTA [tectorin alpha]; TEK [TEK tyrosine kinase, endothelial]; TERF1 [telomeric repeat binding factor (NIMA-interacting) 1]; TERF2 [telomeric repeat binding factor 2]; TERT [telomerase reverse transcriptase]; TES [testis derived transcript (3 LTM domains)]; TF [transferrin]; TFAM [transcription factor A, mitochondrial]; TFAP2A [transcription factor AP-2 alpha (activating enhancer binding protein 2 alpha)]; TFF2 [trefoil factor 2]; TFF3 [trefoil factor 3 (intestinal)]; TFP1 [tissue factor pathway inhibitor (lipoprotein-associated coagulation inhibitor)]; TFPT [TCF3 (E2A) fusion partner (in childhood Leukemia)]; TFR2 [transferrin receptor 2]; TFRC [transferrin receptor (p90, CD71)]; TG [thyroglobulin]; TGFA [transforming growth factor, alpha]; TGFB1 [transforming growth factor, beta 1]; TGFB2 [transforming growth factor, beta 2]; TGFB3 [transforming growth factor, beta 3]; TGFBR1 [transforming growth factor, beta receptor 1]; TGFBR2 [transforming growth factor, beta receptor II (70/80 kDa)]; TGIF1 [TGFB-induced factor homeobox 1]; TGM1 [transglutaminase 1 (K polypeptide epidermal type 1, protein-glutamine-gamma-glutamyltransferase)]; TGM2 [transglutaminase 2 (C polypeptide, protein-glutamine-gamma-glutamyltransferase)]; TGM3 [transglutaminase 3 (E polypeptide, protein-glutamine-gamma-glutamyltransferase)]; TH [tyrosine hydroxylase]; THAP1 [TRAP domain containing, apoptosis associated protein 1]; THBD [thrombomodulin]; THBS1 [thrombospondin 1]; THBS3 [thrombospondin 3]; THPO [thrombopoietin]; THY1 [Thy-1 cell surface antigen]; TIA1 [TIA1 cytotoxic granule-associated RNA binding protein]; TIE1 [tyrosine kinase with immunoglobulin-like and EGF-like domains 1]; TIMD4 [T-cell immunoglobulin and mucin domain containing 4]; TIMELESS [timeless homolog (Drosophila)]; TIMP1 [TIMP metallopeptidase inhibitor 1]; TIMP2 [TIMP metallopeptidase inhibitor 2]; TIMP3 [TIMP metallopeptidase inhibitor 3]; TIRAP [toll-interleukin 1 receptor (TIR) domain containing adaptor protein]; TJP1 [tight junction protein 1 (zona occludens 1)]; TK1 [thymidine kinase 1, soluble]; TK2 [thymidine kinase 2, mitochondrial]; TKT [transketolase]; TLE4 [transducin-like enhancer of split 4 (E(spl) homolog, Drosophila)]; TLR1 [toll-like receptor 1]; TLR1O [toll-like receptor 10]; TLR2 [toll-like receptor 2]; TLR3 [toll-like receptor 3]; TLR4 [toll-like receptor 4]; TLR5 [toll-like receptor 5]; TLR6 [toll-like receptor 6]; TLR7 [toll-like receptor 7]; TLR5 [toll-like receptor 8]; TLR9 [toll-like receptor 9]; TLX1 [T-cellleukemia homeobox 1]; TM7SF4 [transmembrane 7 superfamily member 4]; TMED3 [transmembrane emp24 protein transport domain containing 3]; TMEFF2 [transmembrane protein with EGF-like and two follistatin-like domains 2]; TMEM132E [transmembrane protein 132E]; TMEM18 [transmembrane protein 18]; TMEM19 [transmembrane protein 19]; TMEM216 [transmembrane protein 216]; TMEM27 [transmembrane protein 27]; TMEM67 [transmembrane protein 67]; TMPO [thymopoietin]; TMPRSS15 [transmembrane protease, serine 15]; TMSB4X [thymosin beta 4, X-linked]; TNC [tenascin C]; TNF [tumor necrosis factor (TNF superfamily, member 2)]; TNFAIP1 [tumor necrosis factor, alpha-induced protein 1 (endothelial)]; TNFAIP3 [tumor necrosis factor, alpha-induced protein 3]; TNFA1P6 [tumor necrosis factor, alpha-induced protein 6]; TNFRSF10A [tumor necrosis factor receptor superfamily, member 10a]; TNFRSF10B [tumor necrosis factor receptor superfamily, member 10b]; TNFRSF100 [tumor necrosis factor receptor superfamily, member 10c, decoy without an intracellular domain]; TNFRSF10D [tumor necrosis factor receptor superfamily, member 10d, decoy with truncated death domain]; TNFRSF11A [tumor necrosis factor receptor superfamily, member 11a, NFKB activator]; TNFRSF11B [tumor necrosis factor receptor superfamily, member 11b]; TNFRSF13B [tumor necrosis factor receptor superfamily, member 13B]; TNFRSF130 [tumor necrosis factor receptor superfamily, member 13C]; TNFRSF14 [tumor necrosis factor receptor superfamily, member 14 (herpesvirus entry mediator)]; TNFRSF17 [tumor necrosis factor receptor superfamily, member 17]; TNFRSF18 [tumor necrosis factor receptor superfamily, member 18]; TNFRSF A [tumor necrosis factor receptor superfamily, member 1A]; TNFRSF1B [tumor necrosis factor receptor superfamily, member 1B]; TNFRSF21 [tumor necrosis factor receptor superfamily, member 21]; TNFRSF25 [tumor necrosis factor receptor superfamily, member 25]; TNFRSF4 [tumor necrosis factor receptor superfamily, member 4]; TNFRSF6B [tumor necrosis factor receptor superfamily, member 6b, decoy]; TNFRSF8 [tumor necrosis factor receptor superfamily, member 8]; TNFRSF9 [tumor necrosis factor receptor superfamily, member 9]; TNFSF10 [tumor necrosis factor (ligand) superfamily, member 10]; TNFSF11 [tumor necrosis factor (ligand) superfamily, member 11]; TNFSF12 [tumor necrosis factor (ligand) superfamily, member 12]; TNFSF13 [tumor necrosis factor (ligand) superfamily, member 13]; TNFSF13B [tumor necrosis factor (ligand) superfamily, member 13b]; TNFSF14 [tumor necrosis factor (ligand) superfamily, member 14]; TNFSF15 [tumor necrosis factor (ligand) superfamily, member 15]; TNFSF18 [tumor necrosis factor (ligand) superfamily, member 18]; TNFSF4 [tumor necrosis factor (ligand) superfamily, member 4]; TNFSF8 [tumor necrosis factor (ligand) superfamily, member 8]; TNFSF9 [tumor necrosis factor (ligand) superfamily, member 9]; TNKS [tankyrase, TRF1-interacting ankyrin-related ADP-ribose polymerase]; TNNC1 [troponin C type 1 (slow)]; TNNI2 [troponin I type 2 (skeletal, fast)]; TNNI3 [troponin I type 3 (cardiac)]; TNNT3 [troponin T type 3 (skeletal, fast)]; TNP01 [transportin 1]; TNS1 [tensin 1]; TNXB [tenascin XB]; TOM1L2 [target ofmybl-like 2 (chicken)]; TOP1 [topoisomerase (DNA) I]; TOP1MT [topoisomerase (DNA) 1, mitochondrial]; TOP2A [topoisomerase (DNA) 11 alpha 170 kDa]; TOP2B [topoisomerase (DNA) II beta 180 kDa]; TOP3A [topoisomerase (DNA) III alpha]; TOPBP1 [topoisomerase (DNA) II binding protein 1]; TP53 [tumor protein p53]; TP53BP1 [tumor protein p53 binding protein 1]; TP53RK [TP53 regulating kinase]; TP63 [tumor protein p63]; TP73 [tumor protein p73]; TPD52 [tumor protein D52]; TPH1 [tryptophan hydroxylase 1]; TPi1 [triosephosphate isomerase 1]; TPM1 [tropomyosin 1 (alpha)]; TPM2 [tropomyosin 2 (beta)]; TPMT [thiopurine S-methyltransferase]; TPO [thyroid peroxidase]; TPP1 [tripeptidyl peptidase I]; TPP2 [tripeptidyl peptidase II]; TPPP [tubulin polymerization promoting protein]; TPPP3 [tubulin polymerization-promoting protein family member 3]; TPSAB1 [tryptase alpha/beta 1]; TPSB2 [tryptase beta 2 (gene/pseudogene)]; TPSD1 [ttyptase delta 1]; TPSG1 [tryptase gamma 1]; TPT1 [tumor protein, translationally-controlled 1]; TRADD [TNFRSF1A-associated via death domain]; TRAF1 [TNF receptor-associated factor 1]; TRAF2 [TNF receptor-associated factor 2]; TRAF31P2 [TRAF3 interacting protein 2]; TRAF6 [TN F receptor-associated factor 6]; TRATP [TRAF interacting protein]; TRAPPC1 0 [trafficking protein particle complex 10]; TRDN [triadin]; TREX1 [three prime repair exonuclease 1]; TRH [thyrotropin-releasing hormone]; TRIB1 [tribbles homolog 1 (Drosophila)]; TRIM21 [tripartite motif-containing 21]; TRIM22 [tripartite motif-containing 22]; TRIM26 [tripartite motif-containing 26]; TRIM28 [tripartite motif-containing 28]; TRIM29 [tripartite motif-containing 29]; TRIM68 [tripartite motif-containing 68]; TRPA1 [transient receptor potential cation channel, subfamily A, member 1]; TRPC1 [transient receptor potential cation channel, subfamily C, member 1]; TRPC3 [transient receptor potential cation channel, subfamily C, member 3]; TRPC6 [transient receptor potential cation channel, subfamily C, member 6]; TRPM1 [transient receptor potential cation channel, subfamily M, member 1]; TRPM8 [transient receptor potential cation channel, subfamily M, member 8]; TRPS1 [trichorhinophalangeal syndrome I]; TRPV1 [transient receptor potential cation channel, subfamily V, member 1]; TRPV4 [transient receptor potential cation channel, subfamily V, member 4]; TRPV5 [transient receptor potential cation channel, subfamily V, member 5]; TRPV6 [transient receptor potential cation channel, subfamily V, member 6]; TRRAP [transformation/transcription domain-associated protein]; TSC1 [tuberous sclerosis 1]; TSC2 [tuberous sclerosis 2]; TSC22D3 [TSC22 domain family, member 3]; TSG101 [tumor susceptibility gene 101]; TSHR [thyroid stimulating hormone receptor]; TSLP [thymic stromal lymphopoietin]; TSPAN7 [tetraspanin 7]; TSPO [translocatorprotein (18 kDa)]; TSSK2 [testis-specific serine kinase 2]; TSTA3 [tissue specific transplantation antigen P35B]; TTF2 [transcription termination factor, RNA polymerase II]; TTN [titin]; TTPA [tocopherol (alpha) transfer protein], TTR [transthyretin]; TUBAlB [tubulin, alpha 1b]; TUBA4A [tubulin, alpha4a]; TUBB [tubulin, beta]; TUBB1 [tubulin, beta 1]; TUBG1 [tubulin, gamma 1]; TWIST1 [twist homolog 1 (Drosophila)]; TWSG1 [twisted gastrulation homolog 1 (Drosophila)]; TXK [TXK tyrosine kinase]; TXN [thioredoxin]; TXN2 [thioredoxin 2]; TXNDC5 [thioredoxin domain containing 5 (endoplasmic reticulum)]; TXNDC9 [thioredoxin domain containing 9]; TXNIP [thioredoxin interacting protein]; TXNRD1 [thioredoxin reductase 1]; TXNRD2 [thioredoxin reductase 2]; TYK2 [tyrosine kinase 2]; TYMP [thymidine phosphorylase]; TYMS [thymidylate synthetase]; TYR [tyrosinase (oculocutaneous albinism 1A)]; TYR03 [TYR03 protein tyrosine kinase]; TYROBP [TYRO protein tyrosine kinase binding protein]; TYRP1 [tyrosinase-related protein 1]; UBB [ubiquitin B]; UBC [ubiquitin C]; UBE2C [ubiquitin-conjugating enzyme E2C]; UBE2N [ubiquitin-conjugating enzyme E2N (UBC13 homolog, yeast)]; UBE2U [ubiquitin-conjugating enzyme E2U (putative)]; UBE3A [ubiquitin protein ligase E3A]; UBE4A [ubiquitination factor E4A (UFD2 homolog, yeast)]; UCHL1 [ubiquitin carboxyl-terminal esterase L1 (ubiquitin thiolesterase)]; UCN [urocortin]; UCN2 [urocortin 2]; UCP1 [uncoupling protein 1 (mitochondrial, proton carrier)]; UCP2 [uncoupling protein 2 (mitochondrial, proton carrier)]; UCP3 [uncoupling protein 3 (mitochondrial, proton carrier)]; UFD1L [ubiquitin fusion degradation 1 like (yeast)]; UGCG [UDP-glucose ceramide glucosyltransferase]; UGP2 [UDP-glucose pyrophosphorylase 2]; UGT1A1 [UDP glucuronosyltransferase 1 family, polypeptide A1]; UGT1A6 [UDP glucuronosyltransferase 1 family, polypeptide A6]; UGT1A7 [UDP glucuronosyltransferase 1 family, polypeptide A7]; UGT8 [UDP glycosyltransferase 8]; U1MC1 [ubiquitin interaction motif containing 1]; ULBP1 [UL16 binding protein 1]; ULK2 [unc-51-like kinase 2 (C. elegans)]; UMOD [uromodulin]; UMPS [uridine monophosphate synthetase]; UNC13D [unc-13 homolog D (C. elegans)]; UNC93B1 [unc-93 homolog BI (C. elegans)]; UNG [uracil-DNA glycosylase]; UQCRFS1 [ubiquinol-cytochrome c reductase, Rieske iron-sulfur polypeptide 1]; UROD [uroporphyrinogen decarboxylase]; USF1 [upstream transcription factor 1]; USF2 [upstream transcription factor 2, c-fos interacting]; USP18 [ubiquitin specific peptidase 18]; USP34 [ubiquitin specific peptidase 34]; UTRN [utrophin]; UTS2 [urotensin 2]; VAMPS [vesicle-associated membrane protein 8 (endobrevin)]; VAPA [VAMP (vesicle-associated membrane protein)-associated protein A, 33 kDa]; VASP [vasodilator-stimulated phosphoprotein]; VAV1 [vav 1 guanine nucleotide exchange factor]; VAV3 [vav 3 guanine nucleotide exchange factor]; VCAM1 [vascular cell adhesion molecule 1]; VCAN [versican]; VCL [vinculin]; VDAC1 [voltage-dependent anion channel 1]; VDR [vitamin D (1 [25-dihydroxyvitamin D3) receptor]; VEGFA [vascular endothelial growth factor A]; VEGFC [vascular endothelial growth factor C]; VHL [von Rippel-Lindau tumor suppressor]; VIL1 [villin 1]; VIM [vimentin]; VIP [vasoactive intestinal peptide]; VIPR1 [vasoactive intestinal peptide receptor 1]; VIPR2 [vasoactive intestinal peptide receptor 2]; VLDLR [very low density lipoprotein receptor]; VMAC [vimentin-type intermediate filament associated coiled-coil protein]; VPREB1 [pre-B lymphocyte 1]; VPS39 [vacuolar protein sorting 39 homolog (S. cerevisiae)]; VTN [vitronectin]; VWF [von Willebrand factor]; WARS [tryptophanyl-tRNA synthetase]; WAS [Wiskott-Aldrich syndrome (eczema-thrombocytopenia)]; WASF1 [WAS protein family, member 1]; WASF2 [WAS protein family, member 2]; WASL [Wiskott-Aldrich syndrome-like]; WDFY3 [WD repeat and FYVE domain containing 3]; WDR36 [WD repeat domain 36]; WEE1 [WEE1 homolog (S. pombe)]; WIF1 [WNT inhibitory factor 1]; WIPF1 [WAS/WASL interacting protein family, member 1]; WNK1 [WNK lysine deficient protein kinase 1]; WNT5A [wingless-type MMTV integration site family, member 5A]; WRN [Werner syndrome, RecQ helicase-like]; WT1 [Wilms tumor 1]; XBP1 [X-box binding protein 1]; XCL1 [chemokine (C motif) ligand 1]; XDH [xanthine dehydrogenase]; XIAP [X-linked inhibitor of apoptosis]; XPA [xeroderma pigmentosum, complementation group A]; XPC [xerodetma pigmentosum, complementation group C]; XP05 [exportin 5]; XRCC1 [X-ray repair complementing defective repair in Chinese hamster cells 1]; XRCC2 [X-ray repair complementing defective repair in Chinese hamster cells 2]; XRCC3 [X-ray repair complementing defective repair in Chinese hamster cells 3]; XRCC4 [X-ray repair complementing defective repair in Chinese hamster cells 4]; XRCC5 [X-ray repair complementing defective repair in Chinese hamster cells 5 (double-strand-break rejoining)]; XRCC6 [X-ray repair complementing defective repair in Chinese hamster cells 6]; YAP1 [Yes-associated protein 1]; YARS [tyrosyl-tRNA synthetase]; YBX1 [Y box binding protein 1]; YES 1 [v-yes-1 Yamaguchi sarcoma viral oncogene homolog 1]; YPEL1 [yippee-like 1 (Drosophila)]; YPEL2 [yippee-like 2 (Drosophila)]; YWHAB [tyrosine 3-monooxygenase/tryptophan 5-monooxygenase activation protein, beta polypeptide]; YWHAQ [tyrosine 3-monooxygenase/tryptophan 5-monooxygenase activation protein, theta polypeptide]; YWHAZ [tyrosine 3-monooxygenase/tryptophan 5-monooxygenase activation protein, zeta polypeptide]; YY1 [YY1 transcription factor]; ZAP70 [zeta-chain (TCR) associated protein kinase 70 kDa]; ZBED1 [zinc finger, BED-type containing 1]; ZC3H12A [zinc finger CCCH-type containing 12A]; ZC3H12D [zinc finger CCCH-type containing 12D]; ZFR [zinc finger RNA binding protein]; ZNF148 [zinc finger protein 148]; ZNF267 [zinc finger protein 267]; ZNF287 [zinc finger protein 287]; ZNF300 [zinc finger protein 300]; ZNF365 [zinc finger protein 365]; ZNF521 [zinc finger protein 521]; ZNF74 [zinc finger protein 74]; and ZPBP2 [zona pellucida binding protein 2].

[0349] Examples of proteins associated with Trinucleotide Repeat Disorders include AR (androgen receptor), FMR1 (fragile X mental retardation 1), HTT (huntingtin), DMPK (dystrophia myotonica-protein kinase), FXN (frataxin), ATXN2 (ataxin 2), ATNI (atrophin 1), FEN1 (flap structure-specific endonuclease 1), TNRC6A (trinucleotide repeat containing 6A), PABPN1 (poly(A) binding protein, nuclear 1), JPH3 (junctophilin 3), MED15 (mediator complex subunit 15), ATXN1 (ataxin 1), ATXN3 (ataxin 3), TBP (TATA box binding protein), CACNA1A (calcium channel, voltage-dependent, P/Q type, alpha 1A subunit), ATXN80S (ATXN8 opposite strand (non-protein coding)), PPP2R2B (protein phosphatase 2, regulatory subunit B, beta), ATXN7 (ataxin 7), TNRC6B (trinucleotide repeat containing 6B), TNRC6C (trinucleotide repeat containing 6C), CELF3 (CUGBP, Elav-like family member 3), MAB21L1 (mab-21-like 1 (C. elegans)), MSH2 (mutS homolog 2, colon cancer, nonpolyposis type 1 (E. coli)), TMEM185A (transmembrane protein 185A), SIX5 (SIX homeobox 5), CNPY3 (canopy 3 homolog (zebrafish)), FRAXE (fragile site, folic acid type, rare, fra(X)(q28) E), GNB2 (guanine nucleotide binding protein (G protein), beta polypeptide 2), RPL14 (ribosomal protein L14), ATXN8 (ataxin 8), INSR (insulin receptor), TTR (transthyretin), EP400 (E1A binding protein p400), GIGYF2 (GRB10 interacting GYF protein 2), OGG1 (8-oxoguanine DNA glycosylase), STC (stanniocalcin 1), CNDP1 (carnosine dipeptidase 1 (metallopeptidase M20 family)), C10orf2 (chromosome 10 open reading frame 2), MAML3 mastermind-like 3 (Drosophila), DKC1 (dyskeratosis congenita 1, dyskerin), PAXIP1 (PAX interacting (with transcription-activation domain) protein 1), CASK (calcium/calmodulin-dependent serine protein kinase (MAGUK family)), MAPT (microtubule-associated protein tau), SP1 (Sp1 transcription factor), POLG (polymerase (DNA directed), gamma), AFF2 (AF4/FMR2 family, member 2), THBS1 (thrombospondin 1), TP53 (tumor protein p53), ESR1 (estrogen receptor 1), CGGBP1 (CGG triplet repeat binding protein 1), ABT1 (activator of basal transcription 1), KLK3 (kallikrein-related peptidase 3), PRNP (prion protein), JUN Gun oncogene), KCNN3 (potassium intermediate/small conductance calcium-activated channel, subfamily N, member 3), BAX (BCL2-associated X protein), FRAXA (fragile site, folic acid type, rare, fra(X)(q27.3) A (macroorchidism, mental retardation)). KBTBD10 (kelch repeat and BTB (POZ) domain containing 10), MBNL1 (muscleblind-like (Drosophila)), RAD51 (RAD51 homolog (RecA homolog, E. coli) (S. cerevisiae)), NCOA3 (nuclear receptor coactivator 3), ERDA1 (expanded repeat domain, CAG/CTG 1), TSC1 (tuberous sclerosis 1), COMP (cartilage oligomeric matrix protein), GCLC (glutamate-cysteine ligase, catalytic subunit), RRAD (Ras-related associated with diabetes), MSH3 (mutS homolog 3 (E. coli)). DRD2 (dopamine receptor D2), CD44 (CD44 molecule (Indian blood group)), CTCF (CCCTC-binding factor (zinc finger protein)), CCND1 (cyclin D1), CLSPN (claspin homolog (Xenopus laevis)). MEF2A (myocyte enhancer factor 2A), PTPRU (protein tyrosine phosphatase, receptor type, U), GAPDH (glyceraldehyde-3-phosphate dehydrogenase), TRTM22 (tripartite motif-containing 22), WT1 (Wilms tumor 1), AHR (aryl hydrocarbon receptor), GPX1 (glutathione peroxidase 1), TPMT (thiopurine S-methyltransferase), NDP (Norrie disease (pseudoglioma)), ARX (aristaless related homeobox), MUS81 (MUS81 endonuclease homolog (S. cerevisiae)), TYR (tyrosinase (oculocutaneous albinism 1A)), EGR1 (early growth response 1), UNG (uracil-DNA glycosylase), NUMBL (numb homolog (Drosophila)-like). FABP2 (fatty acid binding protein 2, intestinal). EN2 (engrailed homeobox 2), CRYGC (crystallin, gamma C), SRP14 (signal recognition particle 14 kDa (homologous Alu RNA binding protein)), CRYGB (crystallin, gamma B), PDCD1 (programmed cell death 1), HOXA1 (homeobox A1), ATXN2L (ataxin 2-like), PMS2 (PMS2 postmeiotic segregation increased 2 (S. cerevisiae)), GLA (galactosidase, alpha), CBL (Cas-Br-M (murine) ecotropic retroviral transforming sequence), FTH1 (ferritin, heavy polypeptide 1), IL12RB2 (interleukin 12 receptor, beta 2), OTX2 (orthodenticle homeobox 2), HOXA5 (homeobox AS), POLG2 (polymerase (DNA directed), gamma 2, accessory subunit), DLX2 (distal-less homeobox 2), SIRPA (signal-regulatory protein alpha), OTX1 (orthodenticle homeobox 1), AHRR (aryl-hydrocarbon receptor repressor), MANF (mesencephalic astrocyte-derived neurotrophic factor), TMEM158 (transmembrane protein 158 (gene/pseudogene)), and ENSG00000078687.

[0350] Examples of proteins associated with Neurotransmission Disorders include SST (somatostatin), NOS1 (nitric oxide synthase 1 (neuronal)), ADRA2A (adrenergic, alpha-2A-, receptor), ADRA2C (adrenergic, alpha-2C-, receptor), TACR1 (tachykinin receptor 1), HTR2c (5-hydroxytryptamine (serotonin) receptor 2C), SLC1A2 (solute carrier family 1 (glial high affinity glutamate transporter), member 2), GRM5 (glutamate receptor, metabotropic 5), GRM2 (glutamate receptor, metabotropic 2), GABRG3 (gamma-aminobutyric acid (GABA) A receptor, gamma 3), CACNA1B (calcium channel, voltage-dependent, N type, alpha 1B subunit), NOS2 (nitric oxide synthase 2, inducible), SLC6A5 (solute carrier family 6 (neurotransmitter transporter, glycine), member 5), GABRG1 (gamma-aminobutyric acid (GABA) A receptor, gamma 1), NOS3 (nitric oxide synthase 3 (endothelial cell)), GRM3 (glutamate receptor, metabotropic 3), HTR6 (5-hydroxytryptamine (serotonin) receptor 6), SLC1A3 (solute carrier family 1 (glial high affinity glutamate transporter), member 3), GRM7 (glutamate receptor, metabotropic 7), HRH1 (histamine receptor H1), SLC1A1 (solute carrier family 1 (neuronal/epithelial high affinity glutamate transporter, system Xag), member 1), GRM4 (glutamate receptor, metabotropic 4), GLUD2 (glutamate dehydrogenase 2), ADRA2B (adrenergic, alpha-2B-, receptor), SLC1A6 (solute carrier family 1 (high affinity aspartate/glutamate transporter), member 6), GRM6 (glutamate receptor, metabotropic 6), SLC1A7 (solute carrier family 1 (glutamate transporter), member 7), SLC6A11 (solute carrier family 6 (neurotransmitter transporter. GABA), member 11), CACNA1A (calcium channel, voltage-dependent, P/Q type, alpha 1A subunit), CACNA1G (calcium channel, voltage-dependent, T type, alpha 1G subunit), GRM1 (glutamate receptor, metabotropic 1), CACNA1H (calcium channel, voltage-dependent, T type, alpha 1H subunit), GRM8 (glutamate receptor, metabotropic 8), CHRNA3 (cholinergic receptor, nicotinic, alpha 3), P2RY2 (purinergic receptor P2Y, G-protein coupled, 2), TRPV6 (transient receptor potential cation channel, subfamily V, member 6), CACNA 1E (calcium channel, voltage-dependent, R type, alpha 1 E subunit), ACCN1 (amiloride-sensitive cation channel 1, neuronal), CACNA1I (calcium channel, voltage-dependent, T type, alpha 1I subunit), GABARAP (GABA (A) receptor-associated protein), P2RY1 (purinergic receptor P2Y, G-protein coupled, 1), P2RY6 (pyrimidinergic receptor P2Y, G-protein coupled, 6), RPH3A (rabphilin 3A homolog (mouse)), HOC (histidine decarboxylase), P2RY14 (purinergic receptor P2Y, G-protein coupled, 14), P2RY4 (pyrimidinergic receptor P2Y, G-protein coupled, 4), P2RY1 0 (purinergic receptor P2Y, G-protein coupled, 10), SLC28A3 (solute carrier family 28 (sodium-coupled nucleoside transporter), member 3), NOSTRIN (nitric oxide synthase trafficker), P2RY13 (purinergic receptor P2Y, G-protein coupled, 13), P2RY8 (purinergic receptor P2Y, G-protein coupled, 8), P2RY11 (purinergic receptor P2Y, G-protein coupled, 11), SLC6A3 (solute carrier family 6 (neurotransmitter transporter, dopamine), member 3), HTR3A (5-hydroxytryptamine (serotonin) receptor 3A), DRD2 (dopamine receptor 02), HTR2A (5-hydroxytryptamine (serotonin) receptor 2A), TH (tyrosine hydroxylase), CNR1 (cannabinoid receptor 1 (brain)), VIP (vasoactive intestinal peptide), NPY (neuropeptide Y), GAL (galaninprcpropeptide), TAC1 (tachykinin, precursor 1), SYP (synaptophysin), SLC6A4 (solute carrier family 6 (neurotransmitter transporter, serotonin), member 4), DBH (dopamine beta-hydroxylase (dopamine beta-monooxygenase)), DRD3 (dopamine receptor 03), NR3C1 (nuclear receptor subfamily 3, group C, member 1 (glucocorticoid receptor)), HTR1B (5-hydroxytryptamine (serotonin) receptor 1B), GABBR1 (gamma-aminobutyric acid (GABA) B receptor, 1), CALCA (calcitonin-related polypeptide alpha), CRH (corticotropin releasing hormone), HTR1A (5-hydroxytryptamine (serotonin) receptor 1A), TACR2 (tachykinin receptor 2), COMT (catechol-O-methyltransferase), GRIN2B (glutamate receptor, ionotropic, N-methyl D-aspartate 2B), GRIN2A (glutamate receptor, ionotropic. N-methyl D-aspartate 2A), PRL (prolactin), ACHE (acetylcholinesterase (Yt blood group)), ADRB2 (adrenergic, beta-2-, receptor, surface), ACE (angiotensin I converting enzyme (peptidyl-dipeptidase A) 1), SNAP25 (synaptosomal-associated protein, 25 kDa), GABRA5 (gamma-aminobutyric acid (GABA) A receptor, alpha 5), MECP2 (methyl CpG binding protein 2 (Rett syndrome)), BCHE (butyrylcholinesterase), ADRB1 (adrenergic, beta-1-, receptor), GABRA1 (gamma-aminobutyric acid (GABA) A receptor, alpha 1), GCH1 (GTP cyclohydrolase 1), DOC (dopa decarboxylase (aromatic L-amino acid decarboxylase)), MAOB (monoamine oxidase B), DRD5 (dopamine receptor 05), GABRE (gamma-aminobutyric acid (GABA) A receptor, epsilon), SLC6A2 (solute carrier family 6 (neurotransmitter transporter, noradrenalin), member 2), GABRR2 (gamma-aminobutyric acid (GABA) receptor, rho 2), SV2A (synaptic vesicle glycoprotein 2A), GABRR1 (gamma-aminobutyric acid (GABA) receptor, rho 1), GHRH (growth hormone releasing hormone), CCK (cholecystokinin), PDYN (prodynorphin), SLC6A9 (solute carrier family 6 (neurotransmitter transporter, glycine), member 9), KCND1 (potassium voltage-gated channel. Shal-related subfamily, member 1), SRR (serine racemase), DYT1 0 (dystonia 10), MAPT (microtubule-associated protein tau), APP (amyloid beta (A4) precursor protein), CTSB (cathepsin B), ADA (adenosine deaminase), AKT1 (v-akt murine thymoma viral oncogene homolog 1), GR1N1 (glutamate receptor, ionotropic, N-methyl D-aspartate 1), BDNF (brain-derived neurotrophic factor), HMOX1 (heme oxygenase (decycling) 1), OPRM1 (opioid receptor, mu 1), GRTN2C (glutamate receptor, ionotropic, N-methyl D-aspartate 2C), GRIA1 (glutamate receptor, ionotropic, AMPA1), GABRA6 (gamma-aminobutyric acid (GABA) A receptor, alpha 6), FOS (FBJ murine osteosarcoma viral oncogene homolog), GABRG2 (gamma-aminobutyric acid (GABA) A receptor, gamma 2), GABRB3 (gamma-aminobutyric acid (GABA) A receptor, beta 3), OPRK1 (opioid receptor, kappa 1), GABRB2 (gamma-aminobutyric acid (GABA) A receptor, beta 2), GABRD (gamma-aminobutyric acid (GABA) A receptor, delta), ALDH5A1 (aldehyde dehydrogenase 5 family, member A1), GAD1 (glutamate decarboxylase 1 (brain, 67 kDa)), NSF (N-ethylmaleimide-sensitive factor), GRIN2D (glutamate receptor, ionotropic, N-methyl D-aspartate 2D), ADORA1 (adenosine A1 receptor), GABRA2 (gamma-aminobutyric acid (GABA) A receptor, alpha 2), GLRA1 (glycine receptor, alpha 1), CHRM3 (cholinergic receptor, muscarinic 3), CHAT (choline acetyltransferase), KNG1 (kininogen 1), HMOX2 (heme oxygenase (decycling) 2), DRD4 (dopamine receptor D4), MAOA (monoamine oxidase A), CHRM2 (cholinergic receptor, muscarinic 2), ADORA2A (adenosine A2a receptor), STXBP1 (syntaxin binding protein 1), GABRA3 (gamma-aminobutyric acid (GABA) A receptor, alpha 3), TPH1 (tryptophan hydroxylase 1), HCRTR1 (hypocretin (orexin) receptor 1), HCRTR2 (hypocretin (orexin) receptor 2), CHRM1 (cholinergic receptor, muscarinic 1), FOLHI (folate hydrolase (prostate-specific membrane antigen) 1), AANAT (arylalkylamine N-acetyltransferase), INS (insulin), NR3C2 (nuclear receptor subfamily 3, group C, member 2), FAAH (fatty acid amide hydrolase), GALR2 (galanin receptor 2), ADCYAP1 (adenylate cyclase activating polypeptide 1 (pituitary)), PPP1R1B (protein phosphatase 1, regulatory (inhibitor) subunit 1B), HOMER1 (homer homolog 1 (Drosophila)), ADCY1O (adenylate cyclase 10 (soluble)), PSEN2 (presenilin 2 (Alzheimer disease 4)), UBE3A (ubiquitin protein ligase E3A), SOD1 (superoxide dismutase 1, soluble), LYN (v-yes-1 Yamaguchi sarcoma viral related oncogene homolog), TSC2 (tuberous sclerosis 2), PRKCA (protein kinase C, alpha), PPARG (peroxisome proliferator-activated receptor gamma), ESR1 (estrogen receptor 1), NTRK (neurotrophic tyrosine kinase, receptor, type 1), EGFR (epidermal growth factor receptor (erythroblastic leukemia viral (v-erb-b) oncogene homolog, avian)), S100B (S100 calcium binding protein B), NTRK3 (neurotrophic tyrosine kinase, receptor, type 3), PLCG2 (phospholipase C, gamma 2 (phosphatidylinositol-specific)), NTRK2 (neurotrophic tyrosine kinase, receptor, type 2), DNMT1 (DNA (cytosine-5-)-methyltransferase 1), EGF (epidermal gro ih factor (beta-urogastrone)), GRIA3 (glutamate receptor, ionotrophic, AMPA3), NCAM1 (neural cell adhesion molecule 1), CDKN1A (cyclin-dependent kinase inhibitor 1A (p21, Cip1)), BCL2L1 (BCL2-like 1), TP53 (tumor protein p53), CASP9 (caspase 9, apoptosis-related cysteine peptidase), CCKBR (cholecystokinin B receptor), PARK2 (Parkinson's disease (autosomal recessive, juvenile) 2, parkin), ADRA1B (adrenergic, alpha-1B-, receptor), CASP3 (caspase 3, apoptosis-related cysteine peptidase), PRNP (prion protein), CRHR1 (corticotropin releasing hormone receptor 1), L1 CAM (L1 cell adhesion molecule), NGFR (nerve growth factor receptor (TNFR superfamily, member 16)), CREB1 (cAMP responsive element binding protein 1), PLCG1 (phospholipase C, gamma 1), CAV1 (caveolin 1, caveolae protein, 22 kDa), ABCC8 (ATP-binding cassette, sub-family C(CFTR/MRP), member 8), ACTN2 (actinin, alpha 2), GRIA2 (glutamate receptor, ionotropic, AMPA2), HPRT1 (hypoxanthine phosphoribosyltransferase 1), SYN1 (synapsin T), CSNK2A1 (casein kinase 2, alpha 1 polypeptide), GRIK1 (glutamate receptor, ionotropic, kainate 1), ABCB1 (ATP-binding cassette, sub-family B (MDR/TAP), member 1), AVPR2 (arginine vasopressin receptor 2), HTR4 (5-hydroxytryptamine (serotonin) receptor 4), C3 (complement component 3), AGT (angiotensinogen (serpin peptidase inhibitor, clade A, member 8)), AGTR1 (angiotensin II receptor, type 1), CDK5 (cyclin-dependent kinase 5), LRP1 (low density lipoprotein receptor-related protein 1), ARRB2 (arrestin, beta 2), PLD2 (phospholipase D2), OPRD1 (opioid receptor, delta 1), GNB3 (guanine nucleotide binding protein (G protein), beta polypeptide 3), PIK3CG (phosphoinositide-3-kinase, catalytic, gamma polypeptide), APAF1 (apoptotic peptidase activating factor 1), SSTR2 (somatostatin receptor 2), IL2 (interleukin 2), ADORA3 (adenosine A3 receptor), ADRA1A (adrenergic, alpha-1A-, receptor), HTR7 (5-hydroxytryptamine (serotonin) receptor 7 (adenylate cyclase-coupled)), ADRBK2 (adrenergic, beta, receptor kinase 2), ALOX5 (arachidonate 5-lipoxygenase), NPR1 (natriuretic peptide receptor A/guanylate cyclase A (atrionatriuretic peptide receptor A)), AVPR1A (arginine vasopressin receptor 1A), CHRNB1 (cholinergic receptor, nicotinic, beta 1 (muscle)), SET (SET nuclear oncogene), PAH (phenylalanine hydroxylase), POMC (proopiomelanocortin), LEPR (leptin receptor), SDC2 (syndecan2), VIPR1 (vasoactive intestinal peptide receptor 1), DBI (diazepam binding inhibitor (GABA receptor modulator, acyl-Coenzyme A binding protein)), NPY1R (neuropeptide Y receptor Y1), NPR2 (natriuretic peptide receptor B/guanylate cyclase B (atrionatriuretic peptide receptor B)), CNR2 (cannabinoid receptor 2 (macrophage)), LEP (leptin), CCKAR (cholecystokinin A receptor), GLRB (glycine receptor, beta), KCNQ2 (potassium voltage-gated channel, KQT-like subfamily, member 2), CHRNA2 (cholinergic receptor, nicotinic, alpha 2 (neuronal)), BDKRB2 (bradykinin receptor B2), CHRNA1 (cholinergic receptor, nicotinic, alpha 1 (muscle)), CHRND (cholinergic receptor, nicotinic, delta), CHRNA7 (cholinergic receptor, nicotinic, alpha 7), PLD1 (phospholipase D1, phosphatidylcholine-specific), NRXN1 (neurexin 1), NRP1 (neuropilin 1), DLG3 (discs, large homolog 3 (Drosophila)), GNAQ (guanine nucleotide binding protein (G protein), q polypeptide), DRD1 (dopamine receptor D1), PRKG1 (protein kinase, cGMP-dependent, type I), CNTNAP2 (contactin associated protein-like 2), EDN3 (endothelin3), ABAT (4-aminobutyrate aminotransferase), TD02 (tryptophan2,3-dioxygenase), NEUROD1 (neurogenic differentiation 1), CHRNE (cholinergic receptor, nicotinic, epsilon), CHRNB2 (cholinergic receptor, nicotinic, beta 2 (neuronal)), CHRNB3 (cholinergic receptor, nicotinic, beta 3), HTR1D (5-hydroxytryptamine (serotonin) receptor 1D), ADRA1D (adrenergic, alpha-1D-, receptor), HTR2B (5-hydroxytryptamine (serotonin) receptor 2B), GRIK3 (glutamate receptor, ionotropic, kainate 3), NPY2R (neuropeptide Y receptor Y2), GRIK5 (glutamate receptor, ionotropic, kainate 5), GRIA4 (glutamate receptor, ionotrophic, AMPA4), EDN1 (endothelin 1), PRLR (prolactin receptor), GABRB1 (gamma-aminobutyric acid (GABA) A receptor, beta 1), GARS (glycyl-tRNA synthetase), GRIK2 (glutamatereceptor, ionotropic, kainate 2), ALOX12 (arachidonate 12-lipoxygenase), GAD2 (glutamate decarboxylase 2 (pancreatic islets and brain, 65 kDa)), LHCGR (luteinizing hormone/choriogonadotropin receptor), SHMT1 (serine hydroxymethyltransferase 1 (soluble)), PDXK (pyridoxal (pyridoxine, vitamin B6) kinase), LIF (leukemia inhibitory factor (cholinergic differentiation factor)), PLCD1(phospholipase C, delta 1), NTF3 (neurotrophin 3), NFE2L2 (nuclear factor (erythroid-derived 2)-like 2), PLCB4 (phospholipase C, beta 4), GNRHR (gonadotropin-releasing hormone receptor), NLGN1 (neuroligin 1), PPP2R4 (protein phosphatase 2A activator, regulatory subunit 4), SSTR3 (somatostatin receptor 3), CRHR2 (corticotropin releasing hormone receptor 2), NGF (nerve growth factor (beta polypeptide)), NRCAM (neuronal cell adhesion molecule), NRXN3 (neurexin 3), GNRH1 (gonadotropin-releasing hormone 1 (luteinizing-releasing hormone)), TRHR (thyrotropin-releasing hormone receptor), ARRB1 (arrestin, beta 1), INPP1 (inositol polyphosphate-1-phosphatase), PTN (pleiotrophin), PSMD10 (proteasome (prosome, macropain) 26S subunit, non-ATPase, 10), DLG1 (discs, large homolog 1 (Drosophila)), PSMB8 (proteasome (prosome, macropain) subunit, beta type, 8 (large multifunctional peptidase 7)), CYCS (cytochrome c, somatic), ADORA2B (adenosine A2b receptor), ADRB3 (adrenergic, beta-3-, receptor), CHGA (chromogranin A (parathyroid secretory protein 1)), ADM (adrenomedullin), GABRP (gamma-aminobutyric acid (GABA) A receptor, pi), GLRA2 (glycine receptor, alpha 2), PRKG2 (protein kinase, cGMP-dependent, type II), GLS (glutaminase), TACR3 (tachykinin receptor 3), ALDH7A1 (aldehyde dehydrogenase 7 family, member A1), GABBR2 (gamma-aminobutyric acid (GABA) B receptor, 2), GDNF (glial cell derived neurotrophic factor), CNTFR (ciliary neurotrophic factor receptor), CNTN2 (contactin 2 (axonal)), TOR1A (torsin family 1, member A (torsin A)), CNTN1 (contactin 1), CAMK (calcium/calmodulin-dependent protein kinase I), NPPB (natriuretic peptide precursor B), OXTR (oxytocin receptor), OSM (oncostatin M), VIPR2 (vasoactive intestinal peptide receptor 2), CHRNB4 (cholinergic receptor, nicotinic, beta 4), CHRNA5 (cholinergic receptor, nicotinic, alpha 5), AVP (arginine vasopressin), RELN (reelin), GRLF1 (glucocorticoid receptor DNA binding factor 1), NPR3 (natriuretic peptide receptor C/guanylate cyclase C (atrionatriuretic peptide receptor C)), GRIK4 (glutamate receptor, ionotropic, kainate 4), KISS1 (KiSS-1 metastasis-suppressor), HTR5A (5-hydroxytryptamine (serotonin) receptor 5A), ADCYAP1R1 (adenylate cyclase activating polypeptide 1 (pituitary) receptor type 1), GABRA4 (gal1111a-aminobutyric acid (GABA) A receptor, alpha 4), GLRA3 (glycine receptor, alpha 3), INHBA (inhibin, beta A), DLG2 (discs, large homolog 2 (Drosophila)), PPYR1 (pancreatic polypeptide receptor 1), SSTR4 (somatostatin receptor 4), NPPA (natriuretic peptide precursor A), SNAP23 (synaptosomal-associated protein, 23 kDa), AKAP9 (A kinase (PRKA) anchor protein (yotiao) 9), NRXN2 (neurexin 2), FHL2 (four and a half LIM domains 2), TJPI (tight junction protein 1 (zona occludens 1)), NRG1 (neuregulin 1), CAMK4 (calcium/calmodulin-dependent protein kinase IV), CAV3 (caveolin 3), VAMP2 (vesicle-associated membrane protein 2 (synaptobrevin 2)), GALR1 (galanin receptor 1), GHRHR (growth hormone releasing hormone receptor), HTRIE (5-hydroxytryptamine (serotonin) receptor 1E), PENK (proenkephalin), HTT (huntingtin), HOXAI (homeobox AI), NPY5R (neuropeptide Y receptor Y5), UNC119 (unc-119 homolog (C. elegans)), TAT (tyrosine aminotransferase), CNTF (ciliary neurotrophic factor), SHMT2 (serine hydroxymethyltransferase 2 (mitochondrial)), ENTPDI (ectonucleoside triphosphate diphosphohydrolase 1), GRIP I (glutamate receptor interacting protein 1), GRP (gastrin-releasing peptide), NCAM2 (neural cell adhesion molecule 2), SSTR1 (somatostatin receptor 1), CLTB (clathrin, light chain (Lcb)), DAO (D-amino-acid oxidase), QDPR (quinoid dihydropteridine reductase), PYY (peptide YY), PNMT (phenylethanolamine N-methyltransferase), NTSRI (neurotensin receptor 1 (high affinity)), NTS (neurotensin), HCRT (hypocretin (orexin) neuropeptide precursor), SNAP29 (synaptosomal-associated protein, 29 kDa), SNAP91 (synaptosomal-associated protein, 91 kDa homolog (mouse)), MADD (MAP-kinase activating death domain), IDO1 (indoleamine 2,3-dioxygenase 1), TPH2 (tryptophan hydroxylase 2), TAC3 (tachykinin 3), GRTN3A (glutamate receptor, ionotropic, N-methyi-D-aspartate 3A), REN (renin), GALR3 (galanin receptor 3), MAGI2 (membrane associated guanylate kinase, WW and PDZ domain containing 2), KCNJ9 (potassium inwardly-rectifying channel, subfamily J, member 9), BDKRB1 (bradykinin receptor B1), CHRNA6 (cholinergic receptor, nicotinic, alpha 6), CHRM5 (cholinergic receptor, muscarinic 5), CHRNG (cholinergic receptor, nicotinic, gamma), SLC6A1 (solute carrier family 6 (neurotransmitter transporter, GABA), member 1), ENTPD2 (ectonucleoside triphosphate diphosphohydrolase 2), CALCB (calcitonin-related polypeptide beta), SHBG (sex hormone-binding globulin), SERPINA6 (scrpin peptidase inhibitor, clade A (alpha-I antiproteinasc, antitrypsin), member 6), NRG2 (neuregulin 2), PNOC (prepronociceptin), NAPA (N-ethylmaleimide-sensitive factor attachment protein, alpha), PICK I (protein interacting with PRKCA 1), PLCD4 (phospholipase C, delta 4), GCDH (glutaryl-Coenzyme A dehydrogenase), NLGN2 (neuroligin 2), NBEA (neurobeachin), ATPIOA (ATPase, class V, type 10A), RAPGEF4 (Rap guanine nucleotide exchange factor (GEF) 4), UCN (urocortin), PCSK6 (proprotein convertase subtilisin/kexin type 6), HTRIF (5-hydroxytryptamine (serotonin) receptor 1F), SGCB (sarcoglycan, beta (43 kDa dystrophin-associated glycoprotein)), GABRQ (gamma-aminobutyric acid (GABA) receptor, theta), GHRL (ghrelin/obestatin prepropeptide), NCALD (neurocalcin delta), NEUROD2 (neurogenic differentiation 2), DPEPI (dipeptidase 1 (renal)), SLC1A4 (solute carrier family 1 (glutamate/neutral amino acid transporter), member 4), DNM3 (dynamin 3), SLC6A12 (solute carrier family 6 (neurotransmitter transporter, betaine/GABA), member 12), SLC6A6 (solute carrier family 6 (neurotransmitter transporter, taurine), member 6), YMEILI (YMEI-like 1 (S. cerevisiae)), VSNLI (visinin-like 1), SLC17A7 (solute carrier family 17 (sodium-dependent inorganic phosphate cotransporter), member 7), HOMER2 (homer homolog 2 (Drosophila)), SYT7 (synaptotagmin VII), TFIP11 (tuftelin interacting protein 11), GMFB (glia maturation factor, beta), PREB (prolactin regulatory element binding), NTSR2 (neurotensin receptor 2), NTF4 (neurotrophin 4), PPP1R9B (protein phosphatase 1, regulatory (inhibitor) subunit 9B), DISCI (dismpted in schizophrenia 1), NRG3 (neuregulin 3), OXT (oxytocin, prepropeptide), TRH (thyrotropin-releasing hormone), NISCH (nischarin), CRHBP (corticotropin releasing hormone binding protein), SLC6A13 (solute carrier family 6 (neurotransmitter transporter, GABA), member 13), NPPC (natriuretic peptide precursor C), CNTN3 (contactin 3 (plasmacytoma associated)), KAT5 (K (lysine) acetyltransferase 5), CNTN6 (contactin 6), KIAA0101 (KIAA0101), PANX1 (pannexin 1), CTSL1 (cathepsin L), EARS2 (glutamyl-tRNA synthetase 2, mitochondrial (putative)), CRIPT (cysteine-rich PDZ-binding protein), CORT (cortistatin), DLGAP4 (discs, large (Drosophila) homolog-associated protein 4), ASTN2 (astrotactin 2), HTR3B (5-hydroxytryptamine (serotonin) receptor 3B), PMCH (pro-melanin-concentrating hormone), TSPO (translocator protein (18 kDa)), GDF2 (growth differentiation factor 2), CNTNAP1 (contactin associated protein 1), GNRH2 (gonadotropin-releasing hormone 2), AUTS2 (autism susceptibility candidate 2), SV2C (synaptic vesicle glycoprotein 2C), CARTPT (CART prepropeptide), NSUN4 (NOP2/Sun domain family, member 4), CNTN5 (contactin 5), NEUROD4 (neurogenic differentiation 4), NEUROG1 (neurogenin 1), SL™ (SAFB-like, transcription modulator), GNRHR2 (gonadotropin-releasing hormone (type 2) receptor 2), ASTN1 (astrotactin 1), SLC22A18 (solute carrier family 22, member 18), SLC17A6 (solute carrier family 17 (sodium-dependent inorganic phosphate cotransporter), member 6), GABRR3 (gamma-aminobutyric acid (GABA) receptor, rho 3), DAOA (D-amino acid oxidase activator), ENSG00000123384, nd NOS2P1 (nitric oxide synthase 2 pseudogene 1).

[0351] Examples ofneurodevelopmental-associated sequences include A2BP1 [ataxin 2-binding protein 1], AADAT [aminoadipate aminotransferase], AANAT [arylalkylamine N-acetyltransferase], ABAT [4-aminobutyrate aminotransferase], ABCA1 [ATP-binding cassette, sub-family A (ABC1), member 1], ABCA13 [ATP-binding cassette, sub-family A (ABC1), member 13], ABCA2 [ATP-binding cassette, sub-family A (ABC1), member 2], ABCB1 [ATP-binding cassette, sub-family B (MDRTAP), member 1], ABCB11 [ATP-binding cassette, sub-family B (MDR/TAP), member 11], ABCB4 [ATP-binding cassette, sub-family B (MDRTAP), member 4], ABCB6 [ATP-binding cassette, sub-family B (MDR/TAP), member 6], ABCB7 [ATP-binding cassette, sub-family B (MDR/TAP), member 7], ABCC1 [ATP-binding cassette, sub-family C(CFTR/MRP), member 1], ABCC2 [ATP-binding cassette, sub-family C (CFTR/MRP), member 2], ABCC3 [ATP-binding cassette, sub-family C (CFTR/MRP), member 3], ABCC4 [ATP-binding cassette, sub-family C (CFTR/MRP), member 4], ABCD1 [ATP-binding cassette, sub-family D (ALD), member 1], A BCD3 [ATP-binding cassette, sub-family D (ALD), member 3], ABCG1 [ATP-binding cassette, sub-family G (WHITE), member 1], ABCC2 [ATP-binding cassette, sub-family G (WHITE), member 2], ABCC4 [ATP-binding cassette, sub-family G (WHITE), member 4], ABHD11 [abhydrolase domain containing 11], ABi1 [abl-interactor 1], ABL [c-abl oncogene 1, receptor tyrosine kinase], ABL2 [v-abl Abelson murine leukemia viral oncogene homolog 2 (arg, Abelson-related gene)], ABLIM1 [actin binding LIM protein 1], ABLIM2 [actin binding LIM protein family, member 2], ABLIM3 [actin binding LIM protein family, member 3], ABO [ABO blood group (transferase A, alpha 1-3-N-acetylgalactosaminyltransferase; transferase B, alpha 1-3-galactosyltransferase)], ACAA1 [acetyl-Coenzyme A acyltransferase 1], ACACA [acetyl-Coenzyme A carboxylase alpha], ACACB [acetyl-Coenzyme A carboxylase beta], ACADL [acyl-Coenzyme A dehydrogenase, long chain], ACADM [acyl-Coenzyme A dehydrogenase, C-4 to C-12 straight chain], ACADS [acyl-Coenzyme A dehydrogenase, C-2 to C-3 short chain], ACADSB [acyl-Coenzyme A dehydrogenase, short/branched chain], ACAN [aggrecan], ACAT2 [acetyl-Coenzyme A acetyltransferase 2], ACCN1 [amiloride-sensitive cation channel 1, neuronal], ACE [angiotensin I converting enzyme (peptidyl-dipeptidase A) 1], ACE2 [angiotensin I converting enzyme (peptidyl-dipeptidase A) 2], ACHE [acetylcholinesterase (Yt blood group)], ACLY [ATP citrate lyase], ACO1 [aconitase 1, soluble], ACTA1 [actin, alpha 1, skeletal muscle], ACTB [actin, beta], ACTC1 [actin, alpha, cardiac muscle 1], ACTG11 [actin, gamma 1], ACTL6A [actin-like 6A], ACTL6B [actin-like 6B], ACTN1 [actinin, alpha 1], ACTR1A [ARP1 actin-related protein 1 homolog A, centractin alpha (yeast)], ACTR2 [ARP2 actin-related protein 2 homolog (yeast)], ACTR3 [ARP3 actin-related protein 3 homolog (yeast)], ACTR3B [ARP3 actin-related protein 3 homolog B (yeast)], ACVR1 [activin A receptor, type I], ACVR2A [activin A receptor, type IIA], ADA [adenosine deaminase], ADAM10 [ADAM metallopeptidase domain 10], ADAMI I [ADAM metallopeptidase domain 11], ADAM12 [ADAM metallopeptidase domain 12], ADAM15 [ADAM metallopeptidase domain 15], ADAM17 [ADAM metallopeptidase domain 17], ADAM18 [ADAM metallopeptidase domain 18], ADAM19 [ADAM metallopeptidase domain 19 (meltrin beta)], ADAM2 [ADAM metallopeptidase domain 2], ADAM20 [ADAM metallopeptidase domain 20], ADAM21 [ADAM metallopeptidase domain 21], ADAM22 [ADAM metallopeptidase domain 22], ADAM23 [ADAM metallopeptidase domain 23], ADAM28 [ADAM metallopeptidase domain 28], ADAM29 [ADAM metallopeptidase domain 29], ADAM30 [ADAM metallopeptidase domain 30], ADAM8 [ADAM metallopeptidase domain 8], ADAMS [ADAM metallopeptidase domain 9 (meltrin gamma)], ADAMTS1 [ADAM metallopeptidase with thrombospondin type 1 motif, 1], ADAMTS13 [ADAM metallopeptidase with thrombospondin type 1 motif, 13], ADAMTS4 [ADAM metallopeptidase with thrombospondin type 1 motif, 4], ADAMTS5 [ADAM metallopeptidase with thrombospondin type 1 motif, 5], ADAP2 [ArfGAP with dual PH domains 2], ADAR [adenosine deaminase, RNA-specific], ADARB1 [adenosine deaminase, RNA-specific, B1 (RED1 homolog rat)], ADCY1 [adenylate cyclase 1 (brain)], ADCY10 [adenylate cyclase 10 (soluble)], ADCYAP1 [adenylate cyclase activating polypeptide 1 (pituitary)], ADD1 [adducin 1 (alpha)], ADD2 [adducin 2 (beta)], ADR1A [alcohol dehydrogenase 1A (class I), alpha polypeptide], ADIPOQ [adiponectin, C1Q and collagen domain containing], ADK [adenosine kinase], ADM [adrenomedullin], ADNP [activity-dependent neuroprotector homeobox], ADORA1 [adenosine A1 receptor], ADORA2A [adenosine A2a receptor], ADORA2B [adenosine A2b receptor], ADORA3 [adenosine A3 receptor], ADRA1B [adrenergic, alpha-1B-, receptor], ADRA2A [adrenergic, alpha-2A-, receptor], ADRA2B [adrenergic, alpha-2B-, receptor], ADRA2C [adrenergic, alpha-2C-, receptor], ADRB1 [adrenergic, beta-1-, receptor], ADRB2 [adrenergic, beta-2-, receptor, surface], ADRB3 [adrenergic, beta-3-, receptor], ADRBK2 [adrenergic, beta, receptor kinase 2], ADSL [adenylosuccinate lyase], AFF2 [AF4/FMR2 family, member 2], AFM [afamin], AFP [alpha-fetoprotein], AGAP1 [ArfGAP with GTPase domain, ankyrin repeat and PH domain I], AGER [advanced glycosylation end product-specific receptor], AGFG1 [ArfGAP with FG repeats 1], AGPS [alkylglycerone phosphate synthase], AGRN [agrin], AGRP [agouti related protein homolog (mouse)], AGT [angiotensinogen (serpin peptidase inhibitor, clade A, member 8)], AGTR11 [angiotensin II receptor, type I], AGTR2 [angiotensin II receptor, type 2], AHOY [adenosylhomocysteinase], AHi1 [Abelson helper integration site I], AHR [aryl hydrocarbon receptor], AHSG [alpha-2-HS-glycoprotein], AICDA [activation-induced cytidine deaminase], AIFM1 [apoptosis-inducing factor, mitochondrion-associated, 1], AIRE [autoimmune regulator], AKAP 12 [A kinase (PRKA) anchor protein 12], AKAP9 [A kinase (PRKA) anchor protein (yotiao) 9], AKR1A1 [aldo-keto reductase family I, member AI (aldehyde reductase)], AKR1B1 [aldo-keto reductase family 1, member B1 (aldose reductase)], AKR 1 C3 [aldo-keto reductase family I, member C3 (3-alpha hydroxysteroid dehydrogenase, type II)], AKT1 [v-akt murine thymoma viral oncogene homolog 1], AKT2 [v-akt murine thymoma viral oncogene homolog 2], AKT3 [v-akt murine thymoma viral oncogene homolog 3 (protein kinase B, gamma)], ALAD [aminolevulinate, delta-, dehydratase], ALB [albumin], ALB [albumin], ALCAM [activated leukocyte cell adhesion molecule], ALDH1 A1 [aldehyde dehydrogenase 1 family, member A 1], ALDH3A 1 [aldehyde dehydrogenase 3 family, memberA1], ALDH5A1 [aldehyde dehydrogenase 5 family, member AI], ALDH7A1 [aldehyde dehydrogenase 7 family, member AI], ALDH9A1 [aldehyde dehydrogenase 9 family, member A1], ALDOA [aldolase A, fructose-bisphosphate], ALDOB [aldolase B, fructose-bisphosphate], ALDOC [aldolase C, fructose-bisphosphate], ALK [anaplastic lymphoma receptor tyrosine kinase], ALOX12 [arachidonate 12-lipoxygenase], ALOX5 [arachidonate 5-lipoxygenase], ALOX5AP [arachidonate 5-lipoxygenase-activating protein], ALP1 [alkaline phosphatase, intestinal], ALPL [alkaline phosphatase, liver/bone/kidney], ALPP [alkaline phosphatase, placental (Regan isozyme)], ALS2 [amyotrophic lateral sclerosis 2 Guvenilc)], AMACR [alpha-methylacyl-CoA racemase], AMBP [alpha-1-microglobulin/bikunin precursor], AMPH [amphiphysin], ANG [angiogenin, ribonuclease, RNase A family, 5], ANGPT1 [angiopoietin 1], ANGPT2 [angiopoietin 2], ANGPTL3 [angiopoietin-like 3], ANK1 [ankyrin 1, erythrocytic], ANK3 [ankyrin 3, node of Ranvier (ankyrin G)], ANKRD1 [ankyrin repeat domain I (cardiac muscle)], ANP32E [acidic (leucine-rich) nuclear phosphoprotein 32 family, member E], ANPEP [alanyl (membrane) aminopeptidase], ANXA1 [annexin AI], ANXA2 [annexin A2], ANXA5 [annexin AS], API S I [adaptor-related protein complex I, sigma I subunit], API S2 [adaptor-related protein complex I, sigma 2 subunit], AP2A1 [adaptor-related protein complex 2, alpha 1 subunit], AP2B1 [adaptor-related protein complex 2, beta 1 subunit], APAF1 [apoptotic peptidase activating factor 1], APBA1 [amyloid beta (A4) precursor protein-binding, family A, member 1], APBA2 [amyloid beta (A4) precursor protein-binding, family A, member 2], APBB1 [amyloid beta (A4) precursor protein-binding, family B, member 1 (Fe65)], APBB2 [amyloid beta (A4) precursor protein-binding, family B, member 2], APC [adenomatous polyposis coli], APCS [amyloid P component, serum], APEX1 [APEX nuclease (multifunctional DNA repair enzyme) I], APHIB [anterior pharynx defective I homolog B (C. elegans)], APLP1 [amyloid beta (A4) precursor-like protein 1], APOA1 [apolipoprotein A-I], APOA5 [apolipoprotein A-V], APOB [apolipoprotein B (including Ag(x) antigen)], APOC2 [apolipoprotein C-II], APOD [apolipoprotein D], APOE [apolipoprotein E], APOM [apolipoprotein M], APP [amyloid beta (A4) precursor protein], APPL1 [adaptor protein, phosphotyrosine interaction, PH domain and leucine zipper containing 1], APRT [adenine phosphoribosyltransferase], APTX [aprataxin], AQP1 [aquaporin 1 (Colton blood group)], AQP2 [aquaporin 2 (collecting duct)], AQP3 [aquaporin 3 (Gill blood group)], AQP4 [aquaporin 4], AR [androgen receptor], ARC [activity-regulated cytoskeleton-associated protein], AREG [amphiregulin], ARFGEF2 [ADP-ribosylation factor guanine nucleotide-exchange factor 2 (brefeldin A-inhibited)], ARG1 [arginase, liver], ARHGAP1 [Rho GTPase activating protein 1], ARHGAP32 [Rho GTPase activating protein 32], ARHGAP4 [Rho GTPase activating protein 4], ARHGAP5 [Rho GTPase activating protein 5], ARHGDTA [Rho GDP dissociation inhibitor (GDT) alpha], ARHGEF1 [Rho guanine nucleotide exchange factor (GEF) 1], ARHGEF10 [Rho guanine nucleotide exchange factor (GEF) 10], ARHGEF1[Rho guanine nucleotide exchange factor (GEF) 11], ARHGEF12 [Rho guanine nucleotide exchange factor (GEF) 12], ARHGEF15 [Rho guanine nucleotide exchange factor (GEF) 15], ARHGEF16 [Rho guanine nucleotide exchange factor (GEF) 16], ARHGEF2 [Rho/Rae guanine nucleotide exchange factor (GEF) 2], ARHGEF3 [Rho guanine nucleotide exchange factor (GEF) 3], ARHGEF4 [Rho guanine nucleotide exchange factor (GEF) 4], ARHGEF5 [Rho guanine nucleotide exchange factor (GEF) 5], ARHGEF6 [Rac/Cdc42 guanine nucleotide exchange factor (GEF) 6], ARHGEF7 [Rho guanine nucleotide exchange factor (GEF) 7], ARHGEF9 [Cdc42 guanine nucleotide exchange factor (GEF) 9], ARID1A [AT rich interactive domain 1A (SWI-like)], ARIDIB [AT rich interactive domain 1B (SWi1-like)], ARL13B [ADP-ribosylation factor-like 13B], ARPC1A [actin related protein 2/3 complex, subunit 1A, 41 kDa], ARPC1B [actin related protein 2/3 complex, subunit 1B, 41 kDa], ARPC2 [actin related protein 2/3 complex, subunit 2, 34 kDa], ARPC3 [actin related protein 2/3 complex, subunit 3, 21 kDa], ARPC4 [actin related protein 2/3 complex, subunit 4, 20 kDa], ARPC5 [actin related protein 2/3 complex, subunit 5, 16 kDa], ARPC5L [actin related protein 2/3 complex, subunit 5-like], ARPP19 [cAMP-regulated phosphoprotein, 19 kDa], ARR3 [arrestin 3, retinal (X-arrestin)], ARRB2 [arrestin, beta 2], ARSA [arylsulfatase A], ARTN [artemin], ARX [aristaless related homeobox], ASCL1 [achaete-scute complex homolog 1 (Drosophila)], ASMT [acetylserotonin O-methyltransferase], ASPA [aspartoacylase (Canavan disease)], ASPG [asparaginase homolog (S. cerevisiae)], ASPH [aspartate beta-hydroxylase], ASPM [asp (abnormal spindle) homolog, microcephaly associated (Drosophila)], ASRGL1 [asparaginase like 1], ASS1 [argininosuccinate synthase 1], ASTN1 [astrotactin 1], ATAD5 [ATPase family. AAA domain containing 5], ATF2 [activating transcription factor 2], ATF4 [activating transcription factor 4 (tax-responsive enhancer element B67)], ATF6 [activating transcription factor 6], ATM [ataxia telangiectasia mutated], ATOH1 [atonal homolog 1 (Drosophila)], ATOXI [ATXI antioxidant protein 1 homolog (yeast)], ATPIOA [ATPase, class V, type 10A], ATP2A2 [ATPase, Ca++ transporting, cardiac muscle, slow twitch 2], ATP2B2 [ATPase, Ca++ transporting, plasma membrane 2], ATP2B4 [ATPase, Ca++ transporting, plasma membrane 4], ATP50 [ATP synthase, H+ transporting, mitochondrial F1 complex, 0 subunit], ATP6AP1 [ATPase, H+ transporting, lysosomal accessmy protein 1], ATP6VOC [ATPase, R+ transporting, lysosomal16 kDa, VO subunit c], ATP7A [ATPase, Cu++ transpmiing, alpha polypeptide], ATPSA1 [ATPase, aminophospholipid transpmier (APLT), class I, type SA, member 1], ATR [ataxia telangiectasia and Rad3 related], ATRN [attractin], ATRX [alpha thalassemia/mental retardation syndrome X-linked (RAD54 homolog, S. cerevisiae)], ATXN1 [ataxin 1], ATXN2 [ataxin 2], ATXN3 [ataxin 3], AURKA [aurora kinase A], AUTS2 [autism susceptibility candidate 2], AVP [arginine vasopressin], AVPR1A [arginine vasopressin receptor 1A], AXIN2 [axin 2], AXL [AXL receptor tyrosine kinase], AZU1 [azurocidin 1], B2M [beta-2-microglobulin], B3GNT2 [UDP-GlcNAc:betaGal beta-1 [3-N-acetylglucosaminyltransferase 2], B9D1 [B9 protein domain 1], BACE1 [beta-site APP-cleaving enzyme 1], BACE2 [beta-site APP-cleaving enzyme 2], BACH1 [BTB and CNC homology 1, basic leucine zipper transcription factor 1], BAD [BCL2-associated agonist of cell death], BACE2 [B melanoma antigen family, member 2], BAIAP2 [BAil-associated protein 2], BAIAP2L1 [BAil-associated protein 2-like 1], BAK1 [BCL2-antagonist/killer 1], BARD I [BRCA1 associated RING domain 1], BARRL1 [BarR-like homeobox 1], BARHL2 [BarR-like homeobox 2], BASP1 [brain abundant, membrane attached signal protein 1], BAX [BCL2-associated X protein], BAZ1A [bromodomain adjacent to zinc finger domain, 1 A], BAZ1 B [bromodomain adjacent to zinc finger domain, 1 B], BBS9 [Bardet-Biedl syndrome 9], BCAR1 [breast cancer anti-estrogen resistance 1], BCRE [butyrylcholinesterase], BCL10 [B-cell CLLilymphoma 10], BCL2 [B-cell CLL/lymphoma 2], BCL2A1 [BCL2-related protein AI], BCL2L1 [BCL2-like 1], BCL2L11 [BCL2-like 11 (apoptosis facilitator)], BCL3 [B-cell CLL/lymphoma 3], BCL6 [B-cell CLL/lymphoma 6], BCL7A [B-cell CLL/lymphoma 7A], BCL7B [B-cell CLL/lymphoma 7B], BCL7C [B-cell CLL/lymphoma 70], BCR [breakpoint cluster region], BDKRB1 [bradykinin receptor B1], BDNF [brain-derived neurotrophic factor], BECN1 [beclin 1, autophagy related], BEST1 [bestrophin 1], BEX1 [brain expressed. X-linked 1], BEX2 [brain expressedX-linked 2], BGLAP [bone gamma-carboxyglutamate (gla) protein], BGN [biglycan], BID [BR3 interacting domain death agonist], BIN1 [bridging integrator 1], BIRC2 [baculoviral IAP repeat-containing 2], BIRC3 [baculoviral IAP repeat-containing 3], BIRC5 [baculoviral IAP repeat-containing 5], BIRC7 [baculoviral IAP repeat-containing 7], BLK [B lymphoid tyrosine kinase], BLVRB [biliverdin reductase B (flavin reductase (NADPR))], BMi1 [BMi1 polycomb ring finger oncogene], BMP1 [bone morphogenetic protein 1], BMP10 [bone morphogenetic protein 10], BMP15 [bone morphogenetic protein 15], BMP2 [bone morphogenetic protein 2], BMP3 [bone morphogenetic protein 3], BMP4 [bone morphogenetic protein 4], BMP5 [bone morphogenetic protein 5], BMP6 [bone morphogenetic protein 6], BMP7 [bone morphogenetic protein 7], BMPSA [bone morphogenetic protein Sa], BMPSB [bone morphogenetic protein 8b], BMPR1A [bone morphogenetic protein receptor, type IA], BMPR1B [bone morphogenetic protein receptor, type IB], BMPR2 [bone morphogenetic protein receptor, type II (serine/threonine kinase)], BOC [Boc homolog (mouse)], BOK [BCL2-related ovarian killer], BP1 [bactericidal/permeability-increasing protein], BRAF [v-rafmurine sarcoma viral oncogene homolog B1], BRCA1 [breast cancer 1, early onset], BRCA2 [breast cancer 2, early onset], BRWD1 [bromodomain and WD repeat domain containing 1], BSND [Bartter syndrome, infantile, with sensorineural deafness (Barttin)], BST2 [bone marrow stromal cell antigen 2], BTBD1O [BTB (POZ) domain containing 10], BTC [betacellulin], BTD [biotinidase], BTG3 [BTG family, member 3], BTK [Bmton agannnaglobulinemia tyrosine kinase], BTN1A1 [butyrophilin, subfamily 1, member A1], BUB1B [budding uninhibited by benzimidazoles 1 homolog beta (yeast)], C15orf2 [chromosome 15 open reading frame 2], C16 or 175 [chromosome 16 open reading frame 75], C17orf42 [chromosome 17 open reading frame 42], C1orf187 [chromosome 1 open reading frame 187], C1R [complement component 1, r subcomponent], CIS [complement component 1, s subcomponent], C21orf2 [chromosome 21 open reading frame 2], C21orf33 [chromosome 21 open reading frame 33], C21orf45 [chromosome 21 open reading frame 45], C21orf62 [chromosome 21 open reading frame 62], C2 orf74 [chromosome 21 open reading frame 74], C3 [complement component 3], C3orf58 [chromosome 3 open reading frame 58], C4A [complement component 4A (Rodgers blood group)], C4B [complement component 4B (Chido blood group)], C5AR1 [complement component Sa receptor 1], C6orf106 [chromosome 6 open reading frame 106], C6orf25 [chromosome 6 open reading frame 25], CA1 [carbonic anhydrase 1], CA2 [carbonic anhydrase II], CA3 [carbonic anhydrase III, muscle specific], CA6 [carbonic anhydrase VI], CA9 [carbonic anhydrase IX], CABIN1 [calcineurin binding protein 1], CABLES1 [Cdk5 and Abl enzyme substrate 1], CACNAB [calcium channel, voltage-dependent, N type, alpha 1B subunit], CACNA1C [calcium channel, voltage-dependent, L type, alpha 1C subunit], CACNA1G [calcium channel, voltage-dependent, T type, alpha 1 G subunit], CACNA1H [calcium channel, voltage-dependent, T type, alpha 1H subunit], CACNA2D1 [calcium channel, voltage-dependent, alpha 2/delta subunit 1], CADM1 [cell adhesion molecule 1], CADPS2 [Ca-++-dependent secretion activator 2], CALB2 [calbindin 2], CALCA [calcitonin-related polypeptide alpha], CALCR [calcitonin receptor], CALM3 [calmodulin 3 (phosphorylase kinase, delta)], CALR [calreticulin], CAMK1 [calcium/calmodulin-dependent protein kinase 1], CAMK2A [calciumicalmodulin-dependent protein kinase II alpha], CAMK2B [calcium/calmodulin-dependent protein kinase II beta], CAMK2G [calcium/calmodulin-dependent protein kinase II gamma], CAMK4 [calcium/calmodulin-dependent protein kinase N], CAMKK2 [calcium/calmodulin-dependent protein kinase kinase 2, beta], CAMP [cathelicidin antimicrobial peptide], CANT1 [calcium activated nucleotidase 1], CANX [calnexin], CAPN1 [calpain 1, (mull) large subunit], CAPN2 [calpain 2, (m/II) large subunit], CAPN5 [calpain 5], CAPZA1 [capping protein (actin filament) muscle Z-line, alpha 1], CARD16 [caspase recmitment domain family, member 16], CARM1 [coactivator-associated arginine methyltransferase 1], CARTPT [CART prepropeptide], CASK [calcium/calmodulin-dependent serine protein kinase (MAGUK family)], CASP1 [caspase 1, apoptosis-related cysteine peptidase (interleukin 1, beta, convertase)], CASP10 [caspase 10, apoptosis-related cysteine peptidase], CASP2 [caspase 2, apoptosis-related cysteine peptidase], CASP3 [caspase 3, apoptosis-related cysteine peptidase], CASP6 [caspase 6, apoptosis-related cysteine peptidase], CASP7 [caspae 7, apoptosis-related cysteine peptidase], CASPS [caspase 8, apoptosis-related cysteine peptidase], CASP8AP2 [caspase 8 associated protein 2], CASP9 [caspase 9, apoptosis-related cysteine peptidase], CASR [calcium-sensing receptor], CAST [calpastatin], CAT [catalase], CAV1 [caveolin 1, caveolae protein, 22 kDa], CAV2 [caveolin 2], CAV3 [caveolin 3], CBL [Cas-Br-M (murine) ecotropic retroviral transforming sequence], CBLB [Cas-Br-M (murine) ecotropic retroviral transforming sequence b], CBR11 [carbonyl reductase I], CBR3 [carbonyl reductase 3], CBS [cystathionine-beta-synthase], CBX1 [chromobox homolog 1 (HPI beta homolog Drosophila)], CBX5 [chromobox homolog 5 (HPI alpha homolog, Drosophila)], CC2D2A [coiled-coil and C2 domain containing 2A], CCBE1 [collagen and calcium binding EGF domains I], CCBL1 [cysteine conjugate-beta lyase, cytoplasmic], CCDC50 [coiled-coil domain containing 50], CCK [cholecystokinin], CCKAR [cholecystokinin A receptor], CCL1 [chemokine (C-C motif) ligand 1], CCL11 [chemokine (C-C motif) ligand II], CCL13 [chemokine (C-C motif) ligand 13], CCL17 [chemokine (C-C motif) ligand 17], CCL19 [chemokine (C-C motif) ligand 19], CCL2 [chemokine (C-C motif) ligand 2], CCL20 [chemokine (C-C motif) ligand 20], CCL21 [chemokine (C-C motif) ligand 21], CCL22 [chemokine (C-C motif) ligand 22], CCL26 [chemokine (C-C motif) ligand 26], CCL27 [chemokine (C-C motif) ligand 27], CCL3 [chemokine (C-C motif) ligand 3], CCL4 [chemokine (C-C motif) ligand 4], CCL5 [chemokine (C-C motif) ligand 5], CCL7 [chemokine (C-C motif) ligand 7], CCL5 [chemokine (C-C motif) ligand 8], CCNA1 [cyclin A1], CCNA2 [cyclin A2], CCNB1 [cyclin B1], CCND1 [cyclin DI], CCND2 [cyclin D2], CCND3 [cyclin D3], CCNG1 [cyclin G1], CCNH [cyclin H], CCNT1 [cyclin T1], CCR1 [chemokine (C-C motif) receptor 1], CCR3 [chemokine (C-C motif) receptor 3], CCR4 [chemokine (C-C motif) receptor 4], CCR5 [chemokine (C-C motif) receptor 5], CCR6 [chemokine (C-C motif) receptor 6], CCR7 [chemokine (C-C motif) receptor 7], CCT5 [chaperonin containing TCP1, subunit 5 (epsilon)], CD14 [CD14 molecule], CD19 [CD19 molecule], CD1A [CD1a molecule], CD1B [CDib molecule], CD1D [CDid molecule], CD2 [CD2 molecule], CD209 [CD209 molecule], CD22 [CD22 molecule], CD244 [CD244 molecule, natural killer cell receptor 2B4], CD247 [CD247 molecule], CD27 [CD27 molecule], CD274 [CD274 molecule], CD28 [CD28 molecule], CD2AP [CD2-associated protein], CD33 [CD33 molecule], CD34 [CD34 molecule], CD36 [CD36 molecule (thrombospondin receptor)], CD3E [CD3e molecule, epsilon (CD3-TCR complex)], CD3G [CD3g molecule, gamma (CD3-TCRcomplex)], CD4 [CD4 molecule], CD40 [CD40 molecule. TNF receptor superfamily member 5], CD40LG [CD40 ligand], CD44 [CD44 molecule (Indian blood group)], CD46 [CD46 molecule, complement regulatory protein], CD47 [CD47 molecule], CD5 [CD5 molecule], CD55 [CD55 molecule, decay accelerating factor for complement (Cromer blood group)], CD58 [CD58 molecule], CD59 [CD59 molecule, complement regulatory protein], CD63 [CD63 molecule], CD69 [CD69 molecule], CD7 [CD7 molecule], CD72 [CD72 molecule], CD74 [CD74 molecule, major histocompatibility complex, class II invariant chain], CD79A [CD79a molecule, immunoglobulin-associated alpha], CD79B [CD79b molecule, immunoglobulin-associated beta], CD80 [CD80 molecule], CD8I [CD8I molecule], CD86 [CD86 molecule], CD8A [CD8a molecule], CD9 [CD9 molecule], CD99 [CD99 molecule], CDA [cytidine deaminase], CDC25A [cell division cycle 25 homolog A (S. pombe)], CDC25C [cell division cycle 25 homolog C (S. pombe)], CDC37 [cell division cycle 37 homolog (S. cerevisiae)], CDC42 [cell division cycle 42 (GTP binding protein, 25 kDa)], CDC5L [CDC5 cell division cycle 5-like (S. pombe)], CDH1 [cadherin 1, type I, E-cadherin (epithelial)], CDHIO [cadherin IO, type 2 (T2-cadherin)], CDHI2 [cadherin 12, type 2 (N-cadherin 2)], CDH15 [cadherin 15, type 1, M-cadherin (myotubule)], CDH2 [cadherin 2, type 1, N-cadherin (neuronal)], CDH4 [cadherin 4, type 1, R-cadherin (retinal)], CDH5 [cadherin 5, type 2 (vascular endothelium)], CDH9 [cadherin 9, type 2 (T1-cadherin)], CD1PT [CDP-diacylglycerol-inositol3-phosphatidyltransferase (phosphatidylinositol synthase)], CDK1 [cyclin-dependent kinase 1], CDK14 [cyclin-dependent kinase 14], CDK2 [cyclin-dependent kinase 2], CDK4 [cyclin-dependent kinase 4], CDK5 [cyclin-dependent kinase 5], CDK5R1 [cyclin-dependent kinase 5, regulatory subunit 1 (p35)], CDK5RAP2 [CDK5 regulatory subunit associated protein 2], CDK6 [cyclin-dependent kinase 6], CDK7 [cyclin-dependent kinase 7], CDK9 [cyclin-dependent kinase 9], CDKL5 [cyclin-dependent kinase-like 5], CDKN1A [cyclin-dependent kinase inhibitor 1A (p21, Cip1)], CDKN1B [cyclin-dependent kinase inhibitor 1B (p27, Kip1)], CDKN1C [cyclin-dependent kinase inhibitor 1C (p57, Kip2)], CDKN2A [cyclin-dependent kinase inhibitor 2A (melanoma, p16, inhibits CDK4)], CDKN2B [cyclin-dependent kinase inhibitor 2B (p15, inhibits CDK4)], CDKN2C [cyclin-dependentkinaseinhibitor2C (p18, inhibits CDK4)], CDKN2D [cyclin-dependent kinase inhibitor 2D (p19, inhibits CDK4)], CDNF [cerebral dopamine neurotrophic factor], CDO1 [cysteine dioxygenase, type I], CDR2 [cerebellar degeneration-related protein 2, 62 kDa], CDT1 [chromatin licensing and DNA replication factor 1], CDX1 [caudal type homeobox 1], CDX2 [caudal type homeobox 2], CEACAM1 [carcinoembryonic antigen-related cell adhesion molecule 1 (bilimy glycoprotein)], CEACAM3 [carcinoembryonic antigen-related cell adhesion molecule 3], CEACAM5 [carcinoembryonic antigen-related cell adhesion molecule 5], CEACAM7 [carcinoembryonic antigen-related cell adhesion molecule 7], CEBPB [CCAAT/enhancer binding protein (C/EBP), beta], CEBPD [CCAAT/enhancer binding protein (C/EBP), delta], CECR2 [cat eye syndrome chromosome region, candidate 2], CEL [carboxyl ester lipase (bile salt-stimulated lipase)], CENPC1 [centromere protein C1], CENPJ [centromere protein J], CEP290 [centrosomal protein 290 kDa], CER1 [cerberus 1, cysteine knot superfamily, homolog (Xenopus laevis)], CETP [cholesteryl ester transfer protein, plasma], CFC1 [cripto, FRL-1, cryptic family 1], CFH [complement factor H], CFHR1 [complement factor H-related 1], CFHR3 [complement factor H-related 3], CFHR4 [complement factor H-related 4], CF1 [complement factor I], CFL1 [cofilin 1 (non-muscle)], CFL2 [cofilin 2 (muscle)], CFLAR [CASP8 and FADD-like apoptosis regulator], CFTR [cystic fibrosis transmembrane conductance regulator (ATP-binding cassette sub-family C, member 7)], CGA [glycoprotein hormones, alpha polypeptide], CGB [chorionic gonadotropin, beta polypeptide], CGB5 [chorionic gonadotropin, beta polypeptide 5], CGGBP1 [CGG triplet repeat binding protein 1], CHAF1A [chromatin assembly factor 1, subunit A (p150)], CHAF1B [chromatin assembly factor 1, subunit B (p60)], CHAT [choline acetyltransferase], CHEK1 [CHK1 checkpoint homolog (S. pombe)], CHEK2 [CHK2 checkpoint homolog (S. pombe)], CHGA [chromogranin A (parathyroid secretory protein 1)], CHKA [choline kinase alpha], CHL1 [cell adhesion molecule with homology to L1 CAM (close homolog ofL1)], CHN1 [chimerin (chimaerin) 1], CHP [calcium binding protein P22], CHP2 [calcineurin B homologous protein 2], CHRD [chordin], CHRM1 [cholinergic receptor, muscarinic 1], CHRM2 [cholinergic receptor, muscarinic 2], CHRM3 [cholinergic receptor, muscarinic 3], CHRM5 [cholinergic receptor, muscarinic 5], CHRNA3 [cholinergic receptor, nicotinic, alpha 3], CHRNA4 [cholinergic receptor, nicotinic, alpha 4], CHRNA7 [cholinergic receptor, nicotinic, alpha 7], CHRNB2 [cholinergic receptor, nicotinic, beta 2 (neuronal)], CHST [carbohydrate (keratan sulfate Gal-6) sulfotransferase 1], CHST10 [carbohydrate sulfotransferase 10], CHST3 [carbohydrate (chondroitin 6) sulfotransferase 3], CHUK [conserved helix-loop-helix ubiquitous kinase], CHURC1 [churchill domain containing 1], CIB1 [calcium and integrin binding 1 (calmyrin)], CIITA [class II, major histocompatibility complex, transactivator], CIRBP [cold inducible RNA binding protein], CISD1 [CDGSH iron sulfur domain 1], CISH [cytokine inducible SH2-containing protein], CIT [citron (rho-interacting, serine/threonine kinase 21)], CLASP2 [cytoplasmic linker associated protein 2], CLCF [cardiotrophin-like cytokine factor 1], CLCN2 [chloride channel2], CLDN1 [claudin 1], CLDN14 [claudin 14], CLDN16 [claudin 16], CLDN3 [claudin 3], CLDN4 [claudin 4], CLDN5 [claudin 5], CLDN8 [claudin 8], CLEC12A [C-type lectin domain family 12, member A], CLEC16A [C-type lectin domain family 16, member A], CLEC5A [C-type lectin domain family 5, member A], CLEC7A [C-type lectin domain family 7, member A], CLIP2 [CAP-GLY domain containing linker protein 2], CLSTN1 [calsyntenin 1], CLTC [clathrin, heavy chain (He)], CLU [clusterin], CMIP [c-Maf-inducing protein], CNBP [CCHC-type zinc finger, nucleic acid binding protein], CNGA3 [cyclic nucleotide gated channel alpha 3], CNGB3 [cyclic nucleotide gated channel beta 3], CNN1 [calponin 1, basic, smooth muscle], CNN2 [calponin 2], CNN3 [calponin 3, acidic], CNOT8 [CCR4-NOT transcription complex, subunit 8], CNP [2′ [3′-cyclic nucleotide 3′ phosphodiesterase], CNR1 [cannabinoid receptor 1 (brain)], CNR2 [cannabinoid receptor 2 (macrophage)], CNTF [ciliary neurotrophic factor], CNTFR [ciliary neurotrophic factor receptor], CNTFR [ciliary neurotrophic factor receptor], CNTFR [ciliary neurotrophic factor receptor], CNTLN [centlein, centrosomal protein], CNTN1 [contactin 1], CNTN2 [contactin 2 (axonal)], CNTN4 [contactin 4], CNTNAP1 [contactin associated protein 1], CNTNAP2 [contactin associated protein-like 2], COBL [cordon-bleu homolog (mouse)], COG2 [component of oligomeric golgi complex 2], COL18A1 [collagen, type XVIII, alpha 1], COL1A![collagen, type 1, alpha 1], COL1A2 [collagen, type I, alpha 2], COL2A [collagen, type II, alpha 1], COL3A1 [collagen, type III, alpha 1], COL4A3 [collagen, type IV, alpha 3 (Goodpasture antigen)], COL4A3BP [collagen, type N, alpha 3 (Goodpasture antigen) binding protein], COL5A1 [collagen, type V, alpha 1], COL5A2 [collagen, type V, alpha 2], COL6A1 [collagen, type VI, alpha 1], COL6A2 [collagen, type VI, alpha 2], COL6A3 [collagen, type VI, alpha 3], COMT [catechol-O-methyltransferase], COPG2 [coatomer protein complex, subunit gamma 2], COPS4 [COPS constitutive photomorphogenic homolog subunit 4 (Arabidopsis)], COR01A [coronin, actin binding protein, IA], COX5A [cytochrome c oxidase subunit Va], COX7B [cytochrome c oxidase subunit VIIb], CP [cemloplasmin (ferroxidase)], CPA1 [carboxypeptidase A1 (pancreatic)], CPA2 [carboxypeptidase A2 (pancreatic)], CPA5 [carboxypeptidase A5], CPB2 [carboxypeptidase B2 (plasma)], CPOX [coproporphyrinogen oxidase], CPS1 [carbamoyl-phosphate synthetase 1, mitochondrial], CPT1A [camitine palmitoyltransferase 1A (liver)], CR1 [complement component (3b/4b) receptor 1 (Knops blood group)], CR2 [complement component (3d/Epstein Barr vims) receptor 2], CRABP1 [cellular retinoic acid binding protein 1], CRABP2 [cellular retinoic acid binding protein 2], CRAT [camitine 0-acetyltransferase], CRB1 [crumbs homolog 1 (Drosophila)], CREB1 [cAMP responsive element binding protein 1], CREBBP [CREB binding protein], CRELD1 [cysteine-rich with EGF-like domains 1], CRH [corticotropin releasing hormone], CRIP1 [cysteine-rich protein 1 (intestinal)], CRK [v-crk sarcoma virus CTIO oncogene homolog (avian)], CRKL [v-crk sarcoma virus CTIO oncogene homolog (avian)-like], CRLF1 [cytokine receptor-like factor 1], CRLF2 [cytokine receptor-like factor 2], CRLF3 [cytokine receptor-like factor 3], CRMP1 [collapsin response mediator protein 1], CRP [C-reactive protein, pentraxin-related], CRTC1 [CREB regulated transcription coactivator 1], CRX [cone-rod homeobox], CRYAA [crystallin, alpha A], CRYAB [crystallin, alphaB], CS [citrate synthase], CSAD [cysteine sulfinic acid decarboxylase], CSF1 [colony stimulating factor 1 (macrophage)], CSF1R [colony stimulating factor 1 receptor], CSF2 [colony stimulating factor 2 (granulocyte-macrophage)], CSF2RA [colony stimulating factor 2 receptor, alpha, low-affinity (granulocyte-macrophage)], CSF3 [colony stimulating factor 3 (granulocyte)], CSF3R [colony stimulating factor 3 receptor (granulocyte)], CSH2 [chorionic somatomammotropin hormone 2], CSK [c-src tyrosine kinase], CSMD1 [CUB and Sushi multiple domains 1], CSMD3 [CUB and Sushi multiple domains 3], CSNK1D [casein kinase 1, delta], CSNKIE [casein kinase 1, epsilon], CSNK2A1 [casein kinase 2, alpha 1 polypeptide], CSPG4 [chondroitin sulfate proteoglycan 4], CSPG5 [chondroitin sulfate proteoglycan 5 (neuroglycan C)], CST3 [cystatin C], CST7 [cystatin F (leukocystatin)], CSTB [cystatin B (stefin B)], CTAG1B [cancer/testis antigen 1B], CTBP1 [C-terminal binding protein 1], CTCF [CCCTC-binding factor (zinc finger protein)], CTDSP1 [CTD (carboxy-terminal domain, RNA polymerase II, polypeptide A) small phosphatase 1], CTF1 [cardiotrophin 1], CTGF [connective tissue growth factor], CTLA4 [cytotoxic T-lymphocyte-associated protein 4], CTNNA1 [catenin (cadherin-associated protein), alpha 1, 102 kDa], CTNNAL1 [catenin (cadherin-associated protein), alpha-like 1], CTNNB1 [catenin (cadherin-associated protein), beta 1, 88 kDa], CTNND1 [catenin (cadherin-associated protein), delta 1], CTNND2 [catenin (cadherin-associated protein), delta 2 (neural plakophilin-related arm-repeat protein)], CTNS [cystinosis, nephropathic], CTRL [chymotrypsin-like], CTSB [cathepsin B], CTSC [cathepsin C], CTSD [cathepsin D], CTSG [cathepsin G], CTSH [cathepsin H], CTSL1 [cathepsin L1], CTSS [cathepsin S], CTTN [cortactin], CTTNBP2 [cortactin binding protein 2], CUL4B [cullin 4B], CUL5 [cullin 5], CUX2 [cut-like homeobox 2], CX3CL1 [chemokine (C-X3-C motif) ligand 1], CX3CR1 [chemokine (C-X3-C motif) receptor 1], CXADR [coxsackie virus and adenovirus receptor], CXCL1 [chemokine (C-X-C motif) ligand 1 (melanoma growth stimulating activity, alpha)], CXCLIO [chemokine (C-X-C motif) ligand 10], CXCL12 [chemokine (C-X-C motif) ligand 12 (stromal cell-derived factor 1)], CXCL16 [chemokine (C-X-C motif) ligand 16], CXCL2 [chemokine (C-X-C motif) ligand 2], CXCL5 [chemokine (C-X-C motif) ligand 5], CXCR1 [chemokine (C-X-C motif) receptor 1], CXCR2 [chemokine (C-X-C motif) receptor 2], CXCR3 [chemokine (C-X-C motif) receptor 3], CXCR4 [chemokine (C-X-C motif) receptor 4], CXCR5 [chemokine (C-X-C motif) receptor 5], CYB5A [cytochrome b5 type A (microsomal)], CYBA [cytochrome b-245, alpha polypeptide], CYBB [cytochrome b-245, beta polypeptide], CYCS [cytochrome c, somatic], CYFIP1 [cytoplasmic FMR1 interacting protein 1], CYLD [cylindromatosis (turban tumor syndrome)], CYP11A1 [cytochrome P450, family 11, subfamily A, polypeptide 1], CYP11B1 [cytochrome P450, family II, subfamily B, polypeptide 1], CYP11B2 [cytochrome P450, family 11, subfamily B, polypeptide 2], CYP17A1 [cytochrome P450, family 17, subfamily A, polypeptide 1], CYP19A1 [cytochrome P450, family 19, subfamily A, polypeptide 1], CYP1A1 [cytochrome P450, family 1, subfamily A, polypeptide 1], CYP1A2 [cytochrome P450, family 1, subfamily A, polypeptide 2], CYP1B1 [cytochrome P450, family 1, subfamily B, polypeptide 1], CYP21A2 [cytochrome P450, family 21, subfamily A, polypeptide 2], CYP2A6 [cytochrome P450, family 2, subfamily A, polypeptide 6], CYP2B6 [cytochrome P450, family 2, subfamily B, polypeptide 6], CYP2C9 [cytochrome P450, family 2, subfamily C, polypeptide 9], CYP2D6 [cytochrome P450, family 2, subfamily D, polypeptide 6], CYP2E1 [cytochrome P450, family 2, subfamily E, polypeptide 1], CYP3A4 [cytochrome P450, family 3, subfamily A, polypeptide 4], CYP7A1 [cytochrome P450, family 7, subfamily A, polypeptide 1], CYR61 [cysteine-rich, angiogenic inducer, 61], CYSLTR1 [cysteinyl leukotriene receptor 1], CYSLTR2 [cysteinylleukotriene receptor 2], DAB1 [disabled homolog 1 (Drosophila)], DAGLA [diacylglycerol lipase, alpha], DAGLB [diacylglycerol lipase, beta], DAO [D-amino-acid oxidase], DAOA [D-amino acid oxidase activator], DAPK1 [death-associated protein kinase 1], DAPK3 [death-associated protein kinase 3], DAXX [death-domain associated protein], DBH [dopamine beta-hydroxylase (dopamine beta-monooxygenase)], DB1 [diazepam binding inhibitor (GABA receptor modulator, acyl-Coenzyme A binding protein)], DBN1 [drebrin 1], DCAF6 [DDB1 and CUL4 associated factor 6], DCC [deleted in colorectal carcinoma], DCDC2 [doublecortin domain containing 2], DCK [deoxycytidine kinase], DCLK [doublecortin-like kinase 1], DCN [decorin], DCTN1 [dynactin 1 (p150, glued homolog, Drosophila)], DCTN2 [dynactin 2 (p50)], DCTN4 [dynactin 4 (p62)], DCUN1D1 [DCN1, defective in cullin neddylation 1, domain containing 1 (S. cerevisiae)], DCX [doublecortin], DDB1 [damage-specific DNA binding protein 1, 127 kDa], DDC [dopa decarboxylase (aromatic L-amina acid decarboxylase)], DDIT3 [DNA-damage-inducible transcript 3], DDIT4 [DNA-damage-inducible transcript 4], DDIT4L [DNA-damage-inducible transcript 4-like], DDR1 [discoidin domain receptor tyrosine kinase 1], DDXIO [DEAD (Asp-Glu-Ala-Asp) box polypeptide 10], DDX17 [DEAD (Asp-Glu-Ala-Asp) box polypeptide 17], DEFB4A [defensin, beta 4A], DEK [DEK oncogene], DES [desmin], DEXI [Dexi homolog (mouse)], DFFA [DNA fragmentation factor, 45 kDa, alpha polypeptide], DFNB31 [deafness, autosomal recessive 31], DGCR6 [DiGeorge syndrome critical region gene 6], DGUOK [deoxyguanosine kinase], DHCR7 [7-dehydrocholesterol reductase], DHFR [dihydrofolate reductase], DIAPH1 [diaphanous homolog 1 (Drosophila)], DICER11 [dicer 1, ribonuclease type III], D101 [deiodinase, iodothyronine, type I], D102 [deiodinase, iodothyronine, type II], DIP2A [DIP2 disco-interacting protein 2 homolog A (Drosophila)], DIRAS3 [DIRAS family, GTP-binding RAS-like 3], DISC1 [dismpted in schizophrenia 1], DISC2 [dismpted in schizophrenia 2 (non-protein coding)], DKC1 [dyskeratosis congenita 1, dyskerin], DLG1 [discs, large homolog 1 (Drosophila)], DLG2 [discs, large homolog 2 (Drosophila)], DLG3 [discs, large homolog 3 (Drosophila)], DLG4 [discs, large homolog 4 (Drosophila)], DLGAP1 [discs, large (Drosophila) homolog-associated protein 1], DLGAP2 [discs, large (Drosophila) homolog-associated protein 2], DLK1 [delta-like 1 homolog (Drosophila)], DLL1 [delta-like 1 (Drosophila)], DLX1 [distal-less homeobox 1], DLX2 [distal-less homeobox 2], DLX3 [distal-less homeobox 3], DLX4 [distal-less homeobox 4], DLX5 [distal-less homeobox 5], DLX6 [distal-less homeobox 6]. DMBT1 [deleted in malignant brain tumors 1], DMC1 [DMC1 dosage suppressor ofmck1 homolog, meiosis-specific homologous recombination (yeast)], DMD [dystrophin], DMPK [dystrophia myotonica-protein kinase], DNAI2 [dynein, axonemal, intermediate chain 2], DNAJC28 [DnaJ (Hsp40) homolog, subfamily C, member 28], DNAJC30 [DnaJ (Hsp40) homolog, subfamily C, member 30], DNASE1 [deoxyribonuclease I], DNER [deltainotch-like EGF repeat containing], DNLZ [DNL-type zinc finger], DNM1 [dynamin 1], DNM3 [dynamin 3], DNMT1 [DNA (cytosine-5-)-methyltransferase 1], DNMT3A [DNA (cytosine-5-)-methyltransferase 3 alpha], DNMT3B [DNA (cytosine-5-)-methyltransferase 3 beta], DNTT [deoxynucleotidyltransferase, terminal], DOC2A [double C2-like domains, alpha], DOCK1 [dedicator of cytokinesis 1], DOCK3 [dedicator of cytokinesis 3], DOCK4 [dedicator of cytokinesis 4], DOCK7 [dedicator of cytokinesis 7], DOK7 [docking protein 7], DONSON [downstream neighbor of SON], DOPEY11 [dopey family member 1], DOPEY2 [dopey family member 2], DPF1 [D4, zinc and double PHD fingers family 1], DPF3 [D4, zinc and double PHD fingers, family 3], DPH1 [DPH1 homolog (S. cerevisiae)], DPP10 [dipeptidyl-peptidase 10], DPP4 [dipeptidyl-peptidase 4], DPRXP4 [divergent-paired related homeobox pseudogene 4], DPT [dermatopontin], DPYD [dihydropyrimidine dehydrogenase], DPYSL2 [dihydropyrimidinase-like 2], DPYSL3 [dihydropyrimidinase-like 3], DPYSL4 [dihydropyrimidinase-like 4], DPYSL5 [dihydropyrimidinase-like 5], DRD1 [dopamine receptor D1], DR D2 [dopamine receptor D2], DRD3 [dopamine receptor D3], DRD4 [dopamine receptor D4], DRD5 [dopamine receptor D5], DRG1 [developmentally regulated GTP binding protein 1], DRGX [dorsal root ganglia homeobox], DSC2 [desmocollin 2], DSCAM [Down syndrome cell adhesion molecule], DSCAML1 [Down syndrome cell adhesion molecule like 1], DSCR3 [Down syndrome critical region gene 3], DSCR4 [Down syndrome critical region gene 4], DSCR6 [Down syndrome critical region gene 6], DSERG1 [Down syndrome encephalopathy related protein 1], DSG1 [desmoglein 1], DSG2 [desmoglein 2], DSP [desmoplakin], DST [dystonin], DSTN [destrin (actin depolymerizing factor)], DTNBP1 [dystrobrevin binding protein 1], DULLARD [dullard homolog (Xenopus laevis)], DUSP1 [dual specificity phosphatase 1], DUSP13 [dual specificity phosphatase 13], DUSP6 [dual specificity phosphatase 6], DUT [deoxyuridine triphosphatase], DVL1 [dishevelled, dsh homolog 1 (Drosophila)], DYRK1A [dual-pecificity tyrosine-(Y)-phosphorylation regulated kinase IA], DYRK3 [dual-specificity tyrosine-(Y)-phosphorylation regulated kinase 3], DYSF [dysferlin, limb girdle muscular dystrophy 2B (autosomal recessive)], DYX1C1 [dyslexia susceptibility 1 candidate 1], E2F1 [E2F transcription factor 1], EARS2 [glutamyl-tRNA synthetase 2, mitochondrial (putative)], EBF4 [early B-cell factor 4], ECE [endothelin converting enzyme 1], ECHS1 [enoyl Coenzyme A hydratase, short chain, 1, mitochondrial], EDN1 [endothelin 1], EDN2 [endothelin 2], EDN3 [endothelin 3], EDNRA [endothelin receptor type A], EDNRB [endothelin receptor type B], EEF1A1 [eukaryotic translation elongation factor 1 alpha 1], EEF2 [eukaryotic translation elongation factor 2], EEF2K [eukaryotic elongation factor-2 kinase], EFHA1 [EF-hand domain family, member A1], EFNA1 [ephrin-A1], EFNA2 [ephrin-A2], EFNA3 [ephrin-A3], EFNA4 [ephrin-A4], EFNA5 [ephrin-A5], EFNB2 [ephrin-B2], EFNB3 [ephrin-B3], EFS [embryonal Fyn-associated substrate], EGF [epidermal growth factor (beta-urogastrone)], EGFR [epidermal growth factorreceptor (erythroblastic leukemia viral (v-erb-b) oncogene homolog, avian)], EGLN1 [eg1 nine homolog 1 (C. elegans)], EGR1 [early growth response 1], EGR2 [early growth response 2], EGR3 [early growth response 3], EHHADH [enoyl-Coenzyme A, hydratase/3-hydroxyacyl Coenzyme A dehydrogenase], EHMT2 [euchromatic histone-lysine N-methyltransferase 2], EID1 [EP300 interacting inhibitor of differentiation 1], E1F 1AY [eukaryotic translation initiation factor 1A, Y-linked], EIF2AK2 [eukaryotic translation initiation factor 2-alpha kinase 2], EIF2AK3 [eukaryotic translation initiation factor 2-alpha kinase 3], EIF2B2 [eukaryotic translation initiation factor 2B, subunit 2 beta, 39 kDa], ETF2B5 [eukaryotic translation initiation factor 2B, subunit 5 epsilon, 82 kDa], ETF2S1 [eukaryotic translation initiation factor 2, subunit 1 alpha, 35 kDa], EIF2S2 [eukaryotic translation initiation factor 2, subunit 2 beta, 38 kDa], EIF3M [eukaryotic translation initiation factor 3, subunit M], EIF4E [eukaryotic translation initiation factor 4E], EIF4EBP1 [eukaryotic translation initiation factor 4E binding protein 1], EIF4G1 [eukaryotic translation initiation factor 4 gamma, 1], EIF4H [eukaryotic translation initiation factor 4H], ELANE [elastase, neutrophil expressed], ELAVL1 [ELAV (embryonic lethal, abnormal vision, Drosophila)-like 1 (Hu antigen R)], ELAVL3 [ELAV (embryonic lethal, abnormal vision, Drosophila)-like 3 (Hu antigen C)], ELAVL4 [ELAV (embryonic lethal, abnormal vision, Drosophila)-like 4 (Hu antigen D)], ELF5 [E74-like factor 5 (ets domain transcription factor)], ELK1 [ELK1, member of ETS oncogene family], ELMO I [engulfment and cell motility 1], ELN [elastin], ELP4 [elongation protein 4 homolog (S. cerevisiae)], EMP2 [epithelial membrane protein 2], EMP3 [epithelial membrane protein 3], EMX1 [empty spiracles homeobox 1], EMX2 [empty spiracles homeobox 2], EN1 [engrailed homeobox 1], EN2 [engrailed homeobox 2], ENAH [enabled homolog (Drosophila)], ENDOG [endonuclease G], ENG [endoglin], ENO1 [enolase 1, (alpha)], EN02 [enolase 2 (gamma, neuronal)], ENPEP [glutamyl aminopeptidase (aminopeptidase A)], ENPP1 [ectonucleotide pyrophosphatase/phosphodiesterase 1], ENPP2 [ectonucleotide pyrophosphatase/phosphodiesterase 2], ENSA [endosulfine alpha], ENSG00000174496 [ ], ENSG00000183653 [ ], ENSG00000215557 [ ], ENTPD1 [ectonucleoside triphosphate diphosphohydrolase 1], EP300 [E1A binding protein p300], EPCAM [epithelial cell adhesion molecule], EPHA1 [EPH receptor AI], EPHAIO [EPH receptor AIO], EPHA2 [EPH receptor A2], EPHA3 [EPH receptor A3], EPHA4 [EPH receptor A4], EPHA5 [EPH receptor AS], EPHA6 [EPH receptor A6], EPHA7 [EPH receptor A7], EPHA8 [EPH receptor A8], EPHB1 [EPH receptor B1], EPHB2 [EPH receptor B2], EPHB3 [EPH receptor B3], EPHB4 [EPH receptor B4], EPHB6 [EPH receptor B6], EPHX2 [epoxide hydrolase 2, cytoplasmic], EPM2A [epilepsy, progressive myoclonus type 2A, Lafora disease (laforin)], EPO [erythropoietin], EPOR [erythropoietin receptor], EPRS [glutamyl-prolyl-tRNA synthetase], EPS15 [epidermal growth factor receptor pathway substrate 15], ERBB2 [v-erb-b2 erythroblastic leukemia viral oncogene homolog 2, neuro/glioblastoma derived oncogene homolog (avian)], ERBB3 [v-erb-b2 erythroblastic leukemia viral oncogene homolog 3 (avian)], ERBB4 [v-erb-a erythroblastic leukemia viral oncogene homolog 4 (avian)], ERC2 [ELKS/RAB6-interacting/CAST family member 2], ERCC2 [excision repair cross-complementing rodent repair deficiency, complementation group 2], ERCC3 [excision repair cross-complementing rodent repair deficiency, complementation group 3 (xeroderma pigmentosum group B complementing)], ERCC5 [excision repair cross-complementing rodent repair deficiency, complementation group 5], ERCC6 [excision repair cross-complementing rodent repair deficiency, complementation group 6], ERCC8 [excision repair cross-complementing rodent repair deficiency, complementation group 8], EREG [epiregulin], ERG [v-ets erythroblastosis virus E26 oncogene homolog (avian)], ERVWE1 [endogenous retroviral family W, env(C7), member 1], ESD [esterase D/formylglutathione hydrolase], ESR1 [estrogen receptor 1], ESR2 [estrogen receptor 2 (ER beta)], ESRRA [estrogen-related receptor alpha], ESRRB [estrogen-related receptor beta], ETS1 [v-ets erythroblastosis virus E26 oncogene homolog 1 (avian)], ETS2 [v-ets erythroblastosis virus E26 oncogene homolog 2 (avian)], ETV1 [ets variant 1], ETV4 [ets variant 4], ETV5 [ets variant 5], ETV6 [ets variant 6], EVL [Enah/Vasp-like], EXOC4 [exocyst complex component 4], EXOC8 [exocyst complex component 8], EXT1 [exostoses (multiple) 1], EXT2 [exostoses (multiple) 2], EZH2 [enhancer ofzeste homolog 2 (Drosophila)], EZR [ezrin], F12 [coagulation factor XII (Hageman factor)], F2 [coagulation factor TT (thrombin)], F2R [coagulation factor TT (thrombin) receptor], F2RL1 [coagulation factor TT (thrombin) receptor-like 1], F3 [coagulation factor III (thromboplastin, tissue factor)], F7 [coagulation factor VII (serum prothrombin conversion accelerator)], F8 [coagulation factor VII, procoagulant component], F9 [coagulation factor IX], FAAH [fatty acid amide hydrolase], FABP3 [fatty acid binding protein 3, muscle and heart (mammary-derived growth inhibitor)], FABP4 [fatty acid binding protein 4, adipocyte], FABP5 [fatty acid binding protein 5 (psoriasis-associated)]. FABP7 [fatty acid binding protein 7, brain], FADD [Fas (TNFRSF6)-associated via death domain], FADS2 [fatty acid desaturase 2], FAM120C [family with sequence similarity 120C], FAM165B [family with sequence similarity 165, member B], FAM3C [family with sequence similarity 3, member C], FAM53A [family with sequence similarity 53, member A], FARP2 [FERM, RhoGEF and pleckstrin domain protein 2], FARSA [phenylalanyl-tRNA synthetase, alpha subunit], FAS [Fas (TNF receptor superfamily, member 6)], FASLG [Fas ligand (TNF superfamily, member 6)], FASN [fatty acid synthase], FASTK [Pas-activated serine/threonine kinase], FBLN1 [fibulin 1], FBN1 [fibrillin 1], FBP1 [fructose-1 [6-bisphosphatase 1], FBX045 [F-box protein 45], FBXW5 [F-box and WD repeat domain containing 5], FBXW7 [F-box and WD repeat domain containing 7], FCER2 [Fe fragment oflgE, low affinity II, receptor for (CD23)], FCGR1A [Fe fragment oflgG, high affinity Ia, receptor (CD64)], FCGR2A [Fe fragment oflgG, low affinity IIa, receptor (CD32)], FCGR2B [Fe fragment oflgG, low affinity lib, receptor (CD32)], FCGR3A [Fe fragment oflgG, low affinity Ilia, receptor (CD16a)], FCRL3 [Fe receptor-like 3], FDFT1 [famesyl-diphosphate famesyltransferase 1], FDX1 [ferredoxin 1], FDXR [ferredoxin reductase], FECH [ferrochelatase (protoporphyria)], FEMIA [fem-1 homolog a (C. elegans)], FER [fer (fps/fes related) tyrosine kinase], FES [feline sarcoma oncogene], FEZ1 [fasciculation and elongation protein zeta 1 (zygin 1)], FEZ2 [fasciculation and elongation protein zeta 2 (zygin II)], FEZF1 [FEZ family zinc finger 1], FEZF2 [FEZ family zinc finger 2], FGF1 [fibroblast growth factor 1 (acidic)], FGF19 [fibroblast growth factor 19], FGF2 [fibroblast growth factor 2 (basic)], FGF20 [fibroblast growth factor 20], FGF3 [fibroblast growth factor 3 (murine mammary tumor vims integration site (v-int-2) oncogene homolog)], FGF4 [fibroblast growth factor 4], FGF5 [fibroblast growth factor 5], FGF7 [fibroblast growth factor 7 (keratinocyte growth factor)], FGFS [fibroblast growth factorS (androgen-induced)], FGF9 [fibroblast growth factor 9 (glia-activating factor)], FGFBP1 [fibroblast growth factor binding protein 1], FGFR1 [fibroblast growth factor receptor 1], FGFR2 [fibroblast growth factor receptor 2], FGFR3 [fibroblast growth factor receptor 3], FGFR4 [fibroblast growth factor receptor 4], FHIT [fragile histidine triad gene], FHL1 [four and a half LIM domains 1], FHL2 [four and a half LIM domains 2], FIBP [fibroblast growth factor (acidic) intracellular binding protein], FIGF [c-fos induced growth factor (vascular endothelial growth factor D)], FTGNL1 [fidgetin-like 1], FKBP15 [FK506 binding protein 15, 133 kDa], FKBP1B [FK506 binding protein 1B, 12.6 kDa], FKBP5 [FK506 binding protein 5], FKBP6 [FK506 binding protein 6, 36 kDa], FKBP8 [FK506 binding protein 8, 38 kDa], FKTN [fukutin], FLCN [folliculin], FLG [filaggrin], FLi1 [Friend leukemia vims integration 1], FLNA [filamin A, alpha], FLNB [filamin B, beta], FLNC [filamin C, ga111111a], FLT1 [fins-related tyrosine kinase 1 (vascular endothelial growth factor/vascular permeability factor receptor)], FLT3 [fins-related tyrosine kinase 3], FMN1 [fonnin 1], FMNL2 [fonnin-like 2], FMR1 [fragile X mental retardation 1], FN1 [fibronectin1], FOLH [folate hydrolase (prostate-specific membrane antigen) 1], FOLR1 [folate receptor 1 (adult)], FOS [FBJ murine osteosarcoma viral oncogene homolog], FOSB [FBJ murine osteosarcoma viral oncogene homolog B], FOXC2 [forkhead box C2 (MFH-1, mesenchyme forkhead 1)], FOXG1 [forkhead box G1], FOXL2 [forkhead box L2], FOXM1 [forkhead box M1], FOXO1 [forkhead box 01], FOX03 [forkhead box 03], FOXP2 [forkhead box P2], FOXP3 [forkhead box P3], FPR1 [formyl peptide receptor 1], FPR2 [formyl peptide receptor 2], FRMD7 [FERM domain containing 7], FRS2 [fibroblast growth factor receptor substrate 2], FRS3 [fibroblast growth factor receptor substrate 3], FRYL [FRY-like], FSCN1 [fascin homolog 1, actin-bundling protein (Strongylocentrotus purpuratus)], FSHB [follicle stimulating hormone, beta polypeptide], FSHR [follicle stimulating hormone receptor], FST [follistatin], FSTL1 [follistatin-like 1], FSTL3 [follistatin-like 3 (secreted glycoprotein)], FTCD [formiminotransferase cyclodeaminase], FTH1 [ferritin, heavy polypeptide 1], FTL [ferritin, light polypeptide], FTMT [ferritin mitochondrial], FTSJ1 [FtsJ homolog 1 (E. coli)], FUCA1 [fucosidase, alpha-L-1, tissue], FURIN [furin (paired basic amino acid cleaving enzyme)], FUT1 [fucosyltransferase 1 (galactoside 2-alpha-L-fucosyltransferase, H blood group)], FUT4 [fucosyltransferase 4 (alpha (1 [3) fucosyltransferase, myeloid-specific)], FXN [frataxin], FXR1 [fragile X mental retardation, autosomal homolog 1], FXR2 [fragile X mental retardation, autosomal homolog 2], FXYD1 [FXYD domain containing ion transport regulator 1], FYB [FYN binding protein (FYB-120/130)], FYN [FYN oncogene related to SRC, FGR, YES], FZD1 [frizzled homolog 1 (Drosophila)], FZD10 [frizzled homolog 10 (Drowphila)], FZD2 [frizzled homolog 2 (Drosophila)], FZD3 [frizzled homolog 3 (Drosophila)], FZD4 [frizzled homolog 4 (Drosophila)], FZD5 [frizzled homolog 5 (Drosophila)], FZD6 [frizzled homolog 6 (Drosophila)], FZD7 [frizzled homolog 7 (Drosophila)], FZD8 [frizzled homolog 8 (Drosophila)], FZD9 [frizzled homolog 9 (Drosophila)], FZR1 [fizzy/cell division cycle 20 related 1 (Drosophila)], G6PD [glucose-6-phosphate dehydrogenase], GAA [glucosidase, alpha; acid], GAB1 [GRB2-associated binding protein1], GABARAP [GABA(A) receptor-associated protein], GABBR1 [gamma-aminobutyric acid (GABA) B receptor, 1], GABBR2 [gamma-aminobutyric acid (GABA) B receptor, 2], GABPA [GA binding protein transcription factor, alpha subunit 60 kDa], GABRA1 [gamma-aminobutyric acid (GABA) A receptor, alpha 1], GABRA2 [gamma-aminobutyric acid (GABA) A receptor, alpha 2], GABRA3 [gamma-aminobutyric acid (GABA) A receptor, alpha 3], GABRA4 [gamma-aminobutyric acid (GABA) A receptor, alpha 4], GABRA5 [gamma-aminobutyric acid (GABA) A receptor, alpha 5], GABRA6 [gamma-aminobutyric acid (GABA) A receptor, alpha 6], GABRB1 [gamma-aminobutyric acid (GABA) A receptor, beta 1], GABRB2 [gamma-aminobutyric acid (GABA) A receptor, beta 2], GABRB3 [gamma-aminobutyric acid (GABA) A receptor, beta 3], GABRD [gamma-aminobutyric acid (GABA) A receptor, delta], GABRE [gamma-aminobutyric acid (GABA) A receptor, epsilon], GABRG1 [gamma-aminobutyric acid (GABA) A receptor, gamma 1], GABRG2 [gamma-aminobutyric acid (GABA) A receptor, gamma 2], GABRG3 [gamma-aminobutyric acid (GABA) A receptor, gamma 3], GABRP [gamma-aminobutyric acid (GABA) A receptor, pi], GAD1 [glutamate decarboxylase 1 (brain, 67 kDa)], GAD2 [glutamate decarboxylase 2 (pancreatic islets and brain, 65 kDa)], GAL [galanin prepropeptide], GALE [UDP-galactose-4-epimerase], GALK [galactokinase 1], GALT [galactose-1-phosphate uridylyltransferase], GAP43 [growth associated protein 43], GAPDH [glyceraldehyde-3-phosphate dehydrogenase], GARS [glycyl-tRNA synthetase], GART [phosphoribosylglycinamide formyltransferase, phosphoribosylglycinamide synthetase, phosphoribosylaminoimidazole synthetase], GAS1 [growth arrest-specific 1], GAS6 [growth arrest-specific 6], GAST [gastrin], GATA1 [GATA binding protein 1 (globin transcription factor 1)], GATA2 [GATA binding protein 2], GATA3 [GATA binding protein 3], GATA4 [GATA binding protein4], GATA6 [GATA binding protein 6], GBA [glucosidase, beta, acid], GBE1 [glucan (1 [4-alpha-), branching enzyme 1], GBX2 [gastrulation brain homeobox 2], GC [group-specific component (vitamin D binding protein)], GCG [glucagon], GCH1 [GTP cyclohydrolase 1], GCNT1 [glucosaminyl (N-acetyl) transferase 1, core 2], GDAP1 [ganglioside-induced differentiation-associated protein 1], GDF1 [growth differentiation factor 1], GDF11 [growth differentiation factor 11], GDF15 [growth differentiation factor 15], GDF7 [growth differentiation factor 7], GDi1 [GDP dissociation inhibitor 1], GDI2 [GDP dissociation inhibitor 2], GDNF [glial cell derived neurotrophic factor], GDPD5 [glycerophosphodiester phosphodiesterase domain containing 5], GEM [GTP binding protein overexpressed in skeletal muscle], GFAP [glial fibrillary acidic protein], GFER [growth factor, augmenter of liver regeneration], GFi1B [growth factor independent 1B transcription repressor], GFRA1 [GDNF family receptor alpha 1], GFRA2 [GDNF family receptor alpha 2], GFRA3 [GDNF family receptor alpha 3], GFRA4 [GDNF family receptor alpha 4], GGCX [gamma-glutamyl carboxylase], GGNBP2 [gametogenetin binding protein2], GGT1 [gamma-glutamyltransferase 1], GGT2 [gamma-glutamyltransferase 2], GH1 [growth hormone 1], GHR [growth hormone receptor], GHRH [growth hormone releasing hormone], GHRHR [growth hormone releasing hormone receptor], GHRL [ghrelin/obestatin prepropeptide], GHSR [growth hormone secretagogue receptor], GIPR [gastric inhibitory polypeptide receptor], GIT1 [G protein-coupled receptor kinase interacting ArfGAP 1], GJA1 [gap junction protein, alpha 1, 43 kDa], GJA4 [gap junction protein, alpha 4, 37 kDa], GJA5 [gap junction protein, alpha 5, 40 kDa], GJB1 [gap junction protein, beta 1, 32 kDa], GJB2 [gap junction protein, beta 2, 26 kDa], GJB6 [gap junction protein, beta 6, kDa], GLA [galactosidase, alpha], GLB1 [galactosidase, beta 1], GLDC [glycine dehydrogenase (decarboxylating)], GLI1 [GLI family zinc finger 1], GLI2 [GLI family zinc finger 2], GLI3 [GLI family zinc finger 3], GLIS1 [GLIS family zinc finger 1], GLIS2 [GLIS family zinc finger 2], GL01 [glyoxalase I], GLRA2 [glycine receptor, alpha 2], GLRB [glycine receptor, beta], GLS [glutaminase], GLUD1 [glutamate dehydrogenase 1], GLUD2 [glutamate dehydrogenase 2], GLUL [glutamate-ammonia ligase (glutamine synthetase)], GL YAT [glycine-N-acyltransferase], GMFB [glia maturation factor, beta], GMNN [geminin, DNA replication inhibitor], GMPS [guanine monophosphate synthetase], GNA11 [guanine nucleotide binding protein (G protein), alpha 11 (Gq class)], GNA12 [guanine nucleotide binding protein (G protein) alpha 12], GNA13 [guanine nucleotide binding protein (G protein), alpha 13], GNA14 [guanine nucleotide binding protein (G protein), alpha 14], GNA15 [guanine nucleotide binding protein (G protein), alpha 15 (Gq class)], GNAI1 [guanine nucleotide binding protein (G protein), alpha inhibiting activity polypeptide 1], GNAT2 [guanine nucleotide binding protein (G protein), alpha inhibiting activity polypeptide 2], GNAI3 [guanine nucleotide binding protein (G protein), alpha inhibiting activity polypeptide 3], GNAL [guanine nucleotide binding protein (G protein), alpha activating activity polypeptide, olfactory type], GNA01 [guanine nucleotide binding protein (G protein), alpha activating activity polypeptide 0], GNAQ [guanine nucleotide binding protein (G protein), q polypeptide], GNAS [GNAS complex locus], GNAT1 [guanine nucleotide binding protein (G protein), alpha transducing activity polypeptide 1], GNAT2 [guanine nucleotide binding protein (G protein), alpha transducing activity polypeptide 2], GNAZ [guanine nucleotide binding protein (G protein), alpha z polypeptide], GNB1 [guanine nucleotide binding protein (G protein), beta polypeptide 1], GNB1L [guanine nucleotide binding protein (G protein), beta polypeptide 1-like], GNB2 [guanine nucleotide binding protein (G protein), beta polypeptide 2], GNB2L1 [guanine nucleotide binding protein (G protein), beta polypeptide 2-like 1], GNB3 [guanine nucleotide binding protein (G protein), beta polypeptide 3], GNB4 [guanine nucleotide binding protein (G protein), beta polypeptide 4], GNB5 [guanine nucleotide binding protein (G protein), beta 5], GNG10 [guanine nucleotide binding protein (G protein), gamma 10], GNG11 [guanine nucleotide binding protein (G protein), gamma 11], GNG12 [guanine nucleotide binding protein (G protein), gamma 12], GNG13 [guanine nucleotide binding protein (G protein), gamma 13], GNG2 [guanine nucleotide binding protein (G protein), gamma 2], GNG3 [guanine nucleotide binding protein (G protein), gamma 3], GNG4 [guanine nucleotide binding protein (G protein), gamma 4], GNG5 [guanine nucleotide binding protein (G protein), gamma 5], GNG7 [guanine nucleotide binding protein (G protein), gamma 7], GNLY [granulysin], GNRH1 [gonadotropin-releasing hormone 1 (luteinizing-releasing hormone)], GNRHR [gonadotropin-releasing hormone receptor], GOLGA2 [golgin A2], GOLGA4 [golgin A4], GOT2 [glutamic-oxaloacetic transaminase 2, mitochondrial (aspartate aminotransferase 2)], GP1BA [glycoprotein 1b (platelet), alpha polypeptide], GP5 [glycoprotein V (platelet)], GP6 [glycoprotein VI (platelet)], GP9 [glycoprotein 1X (platelet)], GPC1 [glypican 1], GPC3 [glypican 3], GPD1 [glycerol-3-phosphate dehydrogenase 1 (soluble)], GPHN [gephyrin], GPI [glucose phosphate isomerase], GPM6A [glycoprotein M6A], GPM6B [glycoprotein M6B], GPR161 [G protein-coupled receptor 161], GPR182 [G protein-coupled receptor 182], GPR56 [G protein-coupled receptor 56], GPRC6A [G protein-coupled receptor, family C, group 6, member A], GPRIN1 [G protein regulated inducer of neurite outgrowth 1], GPT [glutamic-pyruvate transaminase (alanine aminotransferase)], GPT2 [glutamic pyruvate transaminase (alanine aminotransferase) 2], GPX1 [glutathione peroxidase 1], GPX3 [glutathione peroxidase 3 (plasma)], GPX4 [glutathione peroxidase 4 (phospholipid hydroperoxidase)], GRAP [GRB2-related adaptor protein], GRB10 [growth factor receptor-bound protein 10], GRB2 [growth factor receptor-bound protein 2], GRB7 [growth factor receptor-bound protein 7], GREM1 [gremlin 1, cysteine knot superfamily, homolog (Xenopus laevis)], GRIA1 [glutamate receptor, ionotropic, AMPA1], GRIA2 [glutamate receptor, ionotropic, AMPA2], GRIA3 [glutamate receptor, ionotrophic, AMPA3], GRID2 [glutamate receptor, ionotropic, delta 2], GRID21P [glutamate receptor, ionotropic, delta 2 (Grid2) interacting protein], GRIK1 [glutamate receptor, ionotropic, kainate 1], GRIK2 [glutamate receptor, ionotropic, kainate 2], GRTN1 [glutamate receptor, ionotropic, N-methyl D-aspartate 1], GRTN2A [glutamate receptor, ionotropic, N-methyl D-aspartate 2A], GRIP I [glutamate receptor interacting protein 1], GRLF1 [glucocorticoid receptor DNA binding factor 1], GRM1 [glutamate receptor, metabotropic 1], GRM2 [glutamate receptor, metabotropic 2], GRM5 [glutamate receptor, metabotropic 5], GRM7 [glutamate receptor, metabotropic 7], GRM8 [glutamate receptor, metabotropic 8], GRN [granulin], GRP [gastrin-releasing peptide], GRPR [gastrin-releasing peptide receptor], GSK3B [glycogen synthase kinase 3 beta], GSN [gelsolin], GSR [glutathione reductase], GSS [glutathione synthetase], GSTA1 [glutathione S-transferase alpha 1], GSTM1 [glutathione S-transferase mu 1], GSTP1 [glutathione S-transferase pi 1], GSTT1 [glutathione S-transferase theta 1], GSTZ1 [glutathione transferase zeta 1], GTF2B [general transcription factor liB], GTF2E2 [general transcription factor liE, polypeptide 2, beta 34 kDa], GTF2H1 [general transcription factor llIH, polypeptide 1, 62 kDa], GTF2H2 [general transcription factor IIH, polypeptide 2, 44 kDa], GTF2H3 [general transcription factor IIH, polypeptide 3, 34 kDa], GTF2H4 [general transcription factor IIH, polypeptide 4, 52 kDa], GTF2I [general transcription factor IIi], GTF2IRD1 [GTF2I repeat domain containing 1], GTF21RD2 [GTF2I repeat domain containing 2], GUCA2A [guanylate cyclase activator 2A (guanylin)], GUCY1A3 [guanylate cyclase 1, soluble, alpha 3], GUSB [glucuronidase, beta], GYPA [glycophorin A (MNS blood group)], GYPC [glycophorin C (Gerbich blood group)], GZF1 [GDNF-inducible zinc finger protein 1], GZMA [granzyme A (granzyme 1, cytotoxic T-lymphocyte-associated serine esterase 3)], GZMB [granzyme B (granzyme 2, cytotoxic T-lymphocyte-associated serine esterase 1)], H19 [H19, imprinted maternally expressed transcript (non-protein coding)], H1FO [H1 histone family, member 0], H2AFX [H2A histone family, member X], H2AFY [H2A histone family, member Y], H6PD [hexose-6-phosphate dehydrogenase (glucose}-dehydrogenase)], HADHA [hydroxyacyl-Coenzyme A dehydrogenase/3-ketoacyl-Coenzyme A thiolase/enoyl-Coenzyme A hydratase (trifunctional protein), alpha subunit], HAMP [hepcidin antimicrobial peptide], HAND1 [heart and neural crest derivatives expressed 1], HAND2 [hemi and neural crest derivatives expressed 2], HAP1 [huntingtin-associated protein 1], HAPLN1 [hyaluronan and proteoglycan link protein 1], HARS [histidyl-tRNA synthetase], HAS1 [hyaluronan synthase 1], HAS2 [hyaluronan synthase 2], HAS3 [hyaluronan synthase 3], HAX1 [HCLS1 associated protein X-1], HBA2 [hemoglobin, alpha 2], HBB [hemoglobin, beta], HBEGF [heparin-binding EGF-like growth factor], HBG1 [hemoglobin, gamma A], HBG2 [hemoglobin, gamma G], HCCS [holocytochrome c synthase (cytochrome c heme-lyase)], HCK [hemopoietic cell kinase], HCLS1 [hematopoietic cell-specific Lyn substrate 1], HCN4 [hyperpolarization activated cyclic nucleotide-gated potassium channel4], HCRT [hypocretin (orexin) neuropeptide precursor], HCRTR1 [hypocretin (orexin) receptor 1], HCRTR2 [hypocretin (orexin) receptor 2], HDAC1 [histone deacetylase 1], HDAC2 [histone deacetylase 2], HDAC4 [histone deacetylase 4], HDAC9 [histone deacetylase 9], HDC [histidine decarboxylase], HDLBP [high density lipoprotein binding protein], HEPACAM [hepatocyte cell adhesion molecule], HES1 [hairy and enhancer of split 1, (Drosophila)], HES3 [hairy and enhancer of split 3 (Drosophila)], HESS [hairy and enhancer of split 5 (Drosophila)], HES6 [hairy and enhancer of split 6 (Drosophila)], HEXA [hexosaminidase A (alpha polypeptide)], HFE [hemochromatosis], HFE2 [hemochromatosis type 2 Guvenile)], HGF [hepatocyte growth factor (hepapoietin A; scatter factor)], HGS [hepatocyte growth factor-regulated tyrosine kinase substrate], HHEX [hematopoietically expressed homeobox], HHIP [hedgehog interacting protein], HIF1A [hypoxia inducible factor 1, alpha subunit (basic helix-loop-helix transcription factor)], HINT1 [histidine triad nucleotide binding protein 1], HIPK2 [homeodomain interacting protein kinase 2], HIRA [HIR histone cell cycle regulation defective homolog A (S. cerevisiae)], HIRIP3 [HIRA interacting protein 3], HISTIH2AB [histone cluster 1, H2ab], HISTIH2AC [histone cluster 1, H2ac], HISTIH2AD [histone cluster 1, H2ad], HISTIH2AE [histone cluster 1. H2ae], H1STIH2AG [histone cluster 1, H2ag], HIST1H2A1 [histone cluster 1, H2ai], HISTIH2AJ [histone cluster 1, H2aj], H1STIH2AK [histone cluster 1, H2ak], HISTIH2AL [histone cluster 1, H2al], HISTIH2AM [histone cluster 1. H2 am], HISTIH3E [histone cluster 1, H3e], HIST2H2AA3 [histone cluster 2, H2aa3], HIST2H2AA4 [histone cluster 2, H2aa4], HIST2H2AC [histone cluster 2, H2ac], HKR1 [GLI-Kruppel family member HKR1], HLA-A [major histocompatibility complex, class I, A], HLA-B [major histocompatibility complex, class I, B], HLA-C [major histocompatibility complex, class I, C], HLA-DMA [major histocompatibility complex, class 11, DM alpha], HLA-DOB [major histocompatibility complex, class II, DO beta], HLA-DQA1 [major histocompatibility complex, class II, DQ alpha 1], HLA-DQB1 [major histocompatibility complex, class II, DQ beta 1]. HLA-DRA [major histocompatibility complex, class II, DR alpha], HLA-DRB1 [major histocompatibility complex, class II, DR beta 1], HLA-DRB4 [major histocompatibility complex, class II, DR beta 4], HLA-DRB5 [major histocompatibility complex, class II, DR beta 5], HLA-E [major histocompatibility complex, class I, E], HLA-F [major histocompatibility complex, class I, F], HLA-G [major histocompatibility complex, class I, G], HLCS [holocarboxylase synthetase (biotin-(proprionyl-Coenzyme A-carboxylase (ATP-hydrolysing)) ligase)], HMBS [hydroxymethylbilane synthase], HMGA1 [high mobility group AT-hook 1], HMGA2 [high mobility group AT-hook 2], HMGB1 [high-mobility group box 1], HMGCR [3-hydroxy-3-methylglutaryl-Coenzyme A reductase], HMGN1 [high-mobility group nucleosome binding domain 1], HMOX1 [heme oxygenase (decycling) 1], HMOX2 [heme oxygenase (decycling) 2], HNF1A [HNF1 homeobox A], HNF4A [hepatocyte nuclear factor 4, alpha], HNMT [histamine N-methyltransferase], HNRNPA2B1 [heterogeneous nuclear ribonucleoprotein A2/B1], HNRNPK [heterogeneous nuclear ribonucleoprotein K], HNRNPL [heterogeneous nuclear ribonucleoprotein L], HNRNPU [heterogeneous nuclear ribonucleoprotein U (scaffold attachment factor A)], HNRPDL [heterogeneous nuclear ribonucleoprotein D-like], HOMER1 [homer homolog 1 (Drosophila)], HOXA [homeobox A1], HOXA10 [homeobox A10], HOXA2 [homeobox A2], HOXAS [homeobox AS], HOXA9 [homeobox A9], HOXB1 [homeobox B1], HOXB4 [homeobox B4], HOXB9 [horneobox B9], HOXD11 [homeobox D11], HOXD12 [horneobox D12], HOXD13 [horneobox D13], HP [haptoglobin], HPD [4-hydroxyphenylpyruvate dioxygenase], HPRT1 [hypoxanthine phosphoribosyltransferase 1], HPS4 [Hermansky-Pudlak syndrome 4], HPX [hemopexin], HRAS [v-Ha-ras Harvey rat sarcoma viral oncogene homolog], HRG [histidine-rich glycoprotein], HRH1 [histamine receptor H1], HRH2 [histamine receptor H2], HRH3 [histamine receptor H3], HSD11B1 [hydroxysteroid (11-beta) dehydrogenase 1], HSD1B2 [hydroxysteroid (11-beta) dehydrogenase 2], HSD17B10 [hydroxysteroid (17-beta) dehydrogenase 10], HSD3B2 [hydroxy-delta-S-steroid dehydrogenase, 3 beta- and steroid delta-isomerase 2], HSF1 [heat shock transcription factor 1], HSP90AA [heat shock protein 90 kDa alpha (cytosolic), class A member 1], HSP90B1 [heat shock protein 90 kDa beta (Grp94), member 1], HSPA1A [heat shock 70 kDa protein 1A], HSPA4 [heat shock 70 kDa protein 4], HSPAS [heat shock 70 kDa protein S (glucose-regulated protein, 7f: kDa)], HSPAR [heat shock 70 kDa protein R], HSPA9 [heat shock 70 kDa protein 9 (mortalin)], HSPB1 [heat shock 27 kDa protein 1], HSPD1 [heat shock 60 kDa protein 1 (chaperonin)], HSPE1 [heat shock 10 kDa protein 1 (chaperonin 10)], HSPG2 [heparan sulfate proteoglycan 2], HTN1 [histatin 1], HTR1A [S-hydroxytryptamine (serotonin) receptor 1A], HTR1B [S-hydroxytryptamine (serotonin) receptor 1B], HTRID [S-hydroxytryptamine (serotonin) receptor 1D], HTRIE [S-hydroxytryptamine (serotonin) receptor 1E], HTR1F [S-hydroxytryptamine (serotonin) receptor IF], HTR2A [S-hydroxytryptamine (serotonin) receptor 2A], HTR2B [S-hydroxytryptamine (serotonin) receptor 2B], HTR2c [S-hydroxytryptamine (serotonin) receptor 20], HTR3A [S-hydroxytryptamine (serotonin) receptor 3A], HTR3B [S-hydroxytryptamine (serotonin) receptor 3B], HTRSA [S-hydroxytryptamine (serotonin) receptor SA], HTR6 [S-hydroxytryptamine (serotonin) receptor 6], HTR7 [S-hydroxytryptamine (serotonin) receptor 7 (adenylate cyclase-coupled)], HTT [huntingtin], HYAL [hyaluronoglucosaminidase 1], HYOU1 [hypoxia up-regulated 1], IAPP [islet amyloid polypeptide], IBSP [integrin-binding sialoprotein], ICAM1 [intercellular adhesion molecule 1], ICAM2 [intercellular adhesion molecule 2], ICAM3 [intercellular adhesion molecule 3], ICAMS [intercellular adhesion moleculeS, telencephalin], ICOS [inducible T-cell co-stimulator], ID1 [inhibitor of DNA binding 1, dominant negative helix-loop-helix protein], ID2 [inhibitor of DNA binding 2, dominant negative helix-loop-helix protein], ID3 [inhibitor of DNA binding 3, dominant negative helix-loop-helix protein], ID4 [inhibitor of DNA binding 4, dominant negative helix-loop-helix protein], IDE [insulin-degrading enzyme], IDi1 [isopentenyl-diphosphate delta isomerase 1], IDO1 [indoleamine 2 [3-dioxygenase 1], IDS [iduronate 2-sulfatase], IDUA [iduronidase, alpha-L-], IER3 [immediate early response 3], IF127 [interferon, alpha-inducible protein 27], IFNα1 [interferon, alpha 1], IFNa2 [interferon, alpha 2], IFNAR1 [interferon (alpha, beta and omega) receptor 1], IFNAR2 [interferon (alpha, beta and omega) receptor 2], IFNB1 [interferon, beta 1, fibroblast], IFNG [interferon, gamma], IFNGR1 [interferon gamma receptor 1], IFNGR2 [interferon gamma receptor 2 (interferon gamma transducer 1)], IGF1 [insulin-like growth factor 1 (somatomedin C)], IGF1R [insulin-like growth factor 1 receptor], IGF2 [insulin-like growth factor 2 (somatomedin A)], IGF2R [insulin-like growth factor 2 receptor], IGFBP1 [insulin-like growth factor binding protein 1], IGFBP2 [insulin-like growth factor binding protein 2, 36 kDa], TGFBP3 [insulin-like growth factor binding protein 3], TGFBP4 [insulin-like growth factor binding protein 4], IGFBP5 [insulin-like growth factor binding protein 5], IGFBP6 [insulin-like growth factor binding protein 6], IGFBP7 [insulin-like growth factor binding protein 7], IGHA1 [immunoglobulin heavy constant alpha 1], IGHE [immunoglobulin heavy constant epsilon], IGHG1 [immunoglobulin heavy constant gamma 1 (G1m marker)], IGHJ1 [immunoglobulin heavy joining 1], IGHM [immunoglobulin heavy constant mu], IGHMBP2 [immunoglobulin mu binding protein 2], TGKC [immunoglobulin kappa constant], TKBKAP [inhibitor of kappa light polypeptide gene enhancer in B-cells, kinase complex-associated protein], IKBKB [inhibitor of kappa light polypeptide gene enhancer in B-cells, kinase beta], IKZF1 [IKAROS family zinc finger 1 (Ikaros)], IL10 [interleukin 10], IL1 ORA [interleukin 10 receptor, alpha], IL1 ORB [interleukin 10 receptor, beta], IL11 [interleukin 11], IL11RA [interleukin 11 receptor, alpha]. IL12A [interleukin 12A (natural killer cell stimulatory factor 1, cytotoxic lymphocyte maturation factor 1, p35)], IL12B [interleukin 12B (natural killer cell stimulatory factor 2, cytotoxic lymphocyte maturation factor 2, p40)], IL12RB1 [interleukin 12 receptor, beta 1], IL13 [interleukin 13], IL1S [interleukin 15], IL15RA [interleukin 15 receptor, alpha], IL16 [interleukin 16 (lymphocyte chemoattractant factor)], IL17A [interleukin 17A], IL18 [interleukin 18 (interferon-gamma-inducing factor)], IL18BP [interleukin 18 binding protein], ILIA [interleukin 1, alpha], IL1B [interleukin 1, beta], IL1F7 [interleukin 1 family, member 7 (zeta)], IL1R1 [interleukin 1 receptor, type I], IL1R2 [interleukin 1 receptor, type II], IL1RAPL1 [interleukin 1 receptor accessory protein-like 1], IL1RL [interleukin 1 receptor-like 1], IL1RN [interleukin 1 receptor antagonist], IL2 [interleukin 2], IL21 [interleukin 21], IL22 [interleukin 22], IL23A [interleukin 23, alpha subunit p19], IL23R [interleukin 23 receptor], IL29 [interleukin 29 (interferon, lambda 1)], IL2RA [interleukin 2 receptor, alpha], IL2RB [interleukin 2 receptor, beta], IL3 [interleukin 3 (colony-stimulating factor, multiple)], IL3RA [interleukin 3 receptor, alpha (low affinity)], IL4 [interleukin 4], IL4R [interleukin 4 receptor]. IL5 [interleukin 5 (colony-stimulating factor, eosinophil)], IL6 [interleukin 6 (interferon, beta 2)], IL6R [interleukin 6 receptor], IL6ST [interleukin 6 signal transducer (gp130, oncostatin M receptor)], IL7 [interleukin 7], IL7R [interleukin 7 receptor], IL8 [interleukin 8], IL9 [interleukin 9], ILK [integrin-linked kinase], IMMP2L [IMP2 inner mitochondrial membrane peptidase-like (S. cerevisiae)], IMMT [inner membrane protein, mitochondrial (mitofilin)], IMPA1 [inositol(myo)-1(or 4)-monophosphatase 1], IMPDH2 [IMP (inosine monophosphate) dehydrogenase 2], INADL [InaD-like (Drosophila)], INCENP [inner centromere protein antigens 135/155 kDa], ING1 [inhibitor of growth family, member 1], ING3 [inhibitor of gro″‘ih family, member 3], INHA [inhibin, alpha], INHBA [inhibin, beta A], INPP1 [inositol polyphosphate-1-phosphatase], INPP5D [inositol polyphosphate-5-phosphatase, 145 kDa], INPP5E [inositol polyphosphate-5-phosphatase, 72 kDa], INPP5J [inositol polyphosphate-5-phosphatase J], INPPL1 [inositol polyphosphate phosphatase-like 1], INS [insulin], INSIG2 [insulin induced gene 2], INS-IGF2 [INS-IGF2 readthrough transcript], INSL3 [insulin-like 3 (Leydig cell)], INSR [insulin receptor], INVS [inversin], IQCB1 [IQ motif containing B1], IQGAP1 [IQ motif containing GTPase activating protein 1], IRAK1 [interleukin-1 receptor-associated kinase 1], IRAK4 [interleukin-1 receptor-associated kinase 4], IREB2 [iron-responsive element binding protein 2], IRF1 [interferon regulatory factor 1], TRF4 [interferon regulatory factor 4], TRF8 [interferon regulatory factor 8], IRS1 [insulin receptor substrate 1], IRS2 [insulin receptor substrate 2], IRS4 [insulin receptor substrate 4], IRX3 [iroquois homeobox 3], ISG15 [ISG15 ubiquitin-like modifier], ISL1 [ISL LIM homeobox 1], ISL2 [ISL LIM homeobox 2], ISLR2 [immunoglobulin superfamily containing leucine-rich repeat 2], ITGA2 [integrin, alpha 2 (CD49B, alpha 2 subunit ofVLA-2 receptor)], ITGA2B [integrin, alpha 2b (platelet glycoprotein TTb ofTTb/TTTa complex, antigen CD41)], TTGA3 [integrin, alpha 3 (antigen CD49C, alpha 3 subunit ofVLA-3 receptor)], ITGA4 [integrin, alpha 4 (antigen CD49D, alpha 4 subunit ofVLA-4 receptor)], ITGA5 [integrin, alpha 5 (fibronectin receptor, alpha polypeptide)], ITGA6 [integrin, alpha 6], ITGA9 [integrin, alpha 9], ITGAL [integrin, alpha L (antigen CD 11A (p180), lymphocyte function-associated antigen 1; alpha polypeptide)], ITGAM [integrin, alpha M (complement component 3 receptor 3 subunit)], ITGAV [integrin, alpha V (vitronectin receptor, alpha polypeptide, antigen CD51)], ITGAX [integrin, alpha X (complement component 3 receptor 4 subunit)], ITGB1 [integrin, beta 1 (fibronectin receptor, beta polypeptide, antigen CD29 includes MDF2, MSK12)], ITGB2 [integrin, beta 2 (complement component 3 receptor 3 and 4 subunit)], ITGB3 [integrin, beta 3 (platelet glycoprotein Ilia, antigen CD61)], ITGB4 [integrin, beta 4], ITGB6 [integrin, beta 6], ITGB7 [integrin, beta 7], ITIH4 [inter-alpha (globulin) inhibitor H4 (plasma Kallikrein-sensitive glycoprotein)], ITM2B [integral membrane protein 2B], ITPR1 [inositol I [4 [5-triphosphate receptor, type 1], ITPR2 [inositol I [4 [5-triphosphate receptor, type 2], ITPR3 [inositol I [4 [5-triphosphate receptor, type 3], ITSN1 [intersectin 1 (SH3 domain protein)], ITSN2 [intersectin 2], NL [involucrin], JAG1 bagged 1 (Alagille yndrome)], JAK1 [Janus kinase 1], JAK2 [Janus kinase 2], JAK3 [Janus kinase 3], JAM2 [junctional adhesion molecule 2], JARID2 [jumonji, AT rich interactive domain 2], JMJD1 C [jumonji domain containing 10], JMY [junction mediating and regulatory protein, p53 cofactor], JRKL [jerky homolog-like (mouse)], JUN [jun oncogene], JUNB [jun B proto-oncogene], JUND [jun D proto-oncogene], JUP [junction plakoglobin], KAL1 [Kallmann syndrome 1 sequence], KALRN [kalirin, RhoGEF kinase], KARS [lysyl-tRNA syntheta e], KAT2B [K(lysine) acetyltransferase 2B], KATNA1 [katanin p60 (ATPase-containing) subunit A 1], KATNB1 [katanin p80 (WD repeat containing) subunit B1], KCNA4 [potassium voltage-gated channel, shaker-related subfamily, member 4], KCND1 [potassium voltage-gated channel, Shal-related subfamily, member 1], KCND2 [potassium voltage-gated channel, Shal-related subfamily, member 2], KCNE1 [potassium voltage-gated channel, Isk-related family, member 1], KCNE2 [potassium voltage-gated channel, Isk-related family, member 2], KCNH2 [potassium voltage-gated channel, subfamily H (eag-related), member 2], KCNH4 [potassium voltage-gated channel, subfamily H (eag-related), member 4], KCNJ15 [potassium inwardly-rectifying channel, subfamily J, member 15], KCNJ3 [potassium inwardly-rectifying channel, subfamily J, member 3], KCNJ4 [potassium inwardly-rectifying channel, subfamily J, member 4], KCNJ5 [potassium inwardly-rectifying channel, subfamily J, member 5], KCNJ6 [potassium inwardly-rectifying channel, subfamily J, member 6], KCNMA1 [potassium large conductance calcium-activated channel, subfamily M, alpha member 1], KCNN1 [potassium intermediate/small conductance calcium-activated channel, subfamily N, member 1], KCNN2 [potassium intermediate/small conductance calcium-activated channel, subfamily N, member 2], KCNN3 [potassium intermediate/small conductance calcium-activated channel, subfamily N, member 3], KCNQ1 [potassium voltage-gated channel, KQT-like subfamily, member 1], KCNQ2 [potassium voltage-gated channel, KQT-like subfamily, member 2], KDM5C [lysine (K)-specific demethylase 5C], KDR [kinase insert domain receptor (a type III receptor tyrosine kinase)], KIAA0101 [KIAA0101], KIAA0319 [KIAA0319], KIAA1715 [KTAA1715], KTDTNS220 [kinase D-interacting substrate, 220 kDa], KTF15 [kinesin family member 15], KIF16B [kinesin family member 16B], KIF IA [kinesin family member 1A], KIF2A [kinesin heavy chain member 2A], KIF2B [kinesin family member 2B], KIF3A [kinesin family member 3A], KIF5C [kinesin family member 5C], KIF7 [kinesin family member 7], KIR2DL1 [killer cell immunoglobulin-like receptor, two domains, long cytoplasmic tail, 1], KIR2DL3 [killer cell immunoglobulin-like receptor, two domains, long cytoplasmic tail, 3], KIR2DS2 [killer cell immunoglobulin-like receptor, two domains, short cytoplasmic tail, 2], KIR3DL1 [killer cell immunoglobulin-like receptor, three domains, long cytoplasmic tail, 1], KIR3DL2 [killer cell immunoglobulin-like receptor, three domains, long cytoplasmic tail, 2], KIRREL3 [kin ofiRRE like 3 (Drosophila)], KISS [KiSS-1 metastasis-suppressor], KISS1R [KISS1 receptor], KIT [v-kit Hardy-Zuckerman 4 feline sarcoma viral oncogene homolog], KITLG [KIT ligand], KL [klotho], KLF7 [Kruppel-like factor 7 (ubiquitous)], KLK1 [kallikrein 1], KLK10 [kallikrein-related peptidase 10], KLK11 [kallikrein-related peptidase 11], KLK2 [kallikrein-related peptidase 2], KLK3 [kallikrein-related peptidase 3], KLK5 [kallikrein-related peptidase 5], KLRD1 [killer cell lectin-like receptor subfamily D, member 1], KLRK1 [killer cell lectin-like receptor subfamily K, member 1], KMO [kynurenine 3-monooxygenase (kynurenine 3-hydroxylase)], KNG1 [kininogen 1], KPNA2 [karyopherin alpha 2 (RAG cohort 1, importin alpha 1)], KPNB1 [karyopherin (importin) beta 1], KPTN [kaptin (actin binding protein)], KRAS [v-Ki-ras2 Kirsten rat sarcoma viral oncogene homolog], KRIT1 [KRIT1, ankyrin repeat containing], KRT1 [keratin 1], KRT1O [keratin 10], KRT14 [keratin 14], KRT18 [keratin 18], KRT19 [keratin 19], KRT3 [keratin 3], KRT5 [keratin 5], KRT7 [keratin 7], KRT8 [keratin 8], KRTAP19-3 [keratin associated protein 19-3], KRTAP2-1 [keratin associated protein 2-1], L1 CAM [L1 cell adhesion molecule], LACTB [lactamase, beta], LALBA [lactalbumin, alpha-], LAMA1 [laminin, alpha 1], LAMB1 [laminin, beta 1], LAMB2 [laminin, beta 2 (laminin S)], LAMB4 [laminin, beta 4], LAMP1 [lysosomal-associated membrane protein 1], LAMP2 [lysosomal-associated membrane protein 2], LAP3 [leucine aminopeptidase 3], LAPTM4A [lysosomal protein transmembrane 4 alpha], LARGE [like-glycosyltransferase], LARS [leucyl-tRNA synthetase], LASP1 [LIM and SH3 protein 1], LAT2 [linker for activation ofT cells family, member 2], LBP [lipopolysaccharide binding protein], LBR [lamin B receptor], LCA10 [lung carcinoma-associated protein 10], LCA5 [Leber congenital amaurosis 5], LCAT [lecithin-cholesterol acyltransferase], LCK [lymphocyte-specific protein tyrosine kinase], LCN1 [lipocalin 1 (tear prealbumin)], LCN2 [lipocalin 2], LCP1 [lymphocyte cytosolic protein 1 (L-plastin)], LCP2 [lymphocyte cytosolic protein 2 (SH2 domain containing leukocyte protein of 76 kDa)], LCT [lactase], LOB1 [LIM domain binding 1], LDB2 [LIM domain binding 2], LDHA [lactate dehydrogenase A], LDLR [low density lipoprotein receptor], LDLRAP1 [low density lipoprotein receptor adaptor protein 1], LEF1 [lymphoid enhancer-binding factor 1], LEO1 [Leo1, Pafl/RNA polymerase TT complex component, homolog (S. cerevisiae)], LEP [leptin], LEPR [leptin receptor], LGALS13 [lectin, galactoside-binding, soluble, 13], LGALS3 [lectin, galactoside-binding, soluble, 3], LGMN [legumain], LGR4 [leucine-rich repeat-containing G protein-coupled receptor 4], LGTN [ligatin], LHCGR [luteinizing hormone/choriogonadotropin receptor], LHFPL3 [lipoma HMG1C fusion partner-like 3], LHX1 [LIM homeobox 1], LHX2 [LTM homeobox 2], LHX3 [LTM homeobox 3], LHX4 [LTM homeobox 4], LHX9 [LTM homeobox 9], LIF [leukemia inhibitory factor (cholinergic differentiation factor)], LIFR [leukemia inhibitory factor receptor alpha], LIG1 [ligase I, DNA, ATP-dependent], LIG3 [ligase III, DNA, ATP-dependent], LIG4 [ligase N, DNA, ATP-dependent], LILRA3 [leukocyte immunoglobulin-like receptor, subfamily A (without TM domain), member 3], LILRB1 [leukocyte immunoglobulin-like receptor, subfamily B (with TM and ITIM domains), member 1], LIMK1 [LIM domain kinase 1], LIMK2 [LIM domain kinase 2], LIN7A [lin-7 homolog A (C. elegans)], LIN7B [lin-7 homolog B (C. elegans)], LIN7C [lin-7 homolog C (C. elegans)], LING01 [leucine rich repeat and Ig domain containing 1], LIPC [lipase, hepatic], LIPE [lipase, hormone-sensitive], LLGL1 [lethal giant larvae homolog 1 (Drosophila)], LMAN1 [lectin, mannose-binding, 1], LMNA [lamin A/C], LMO2 [LIM domain only 2 (rhombotin-like 1)]. LMXIA [LIM homeobox transcription factor 1, alpha], LMX1B [LIM homeobox transcription factor 1, beta], LNPEP [leucyl/cystinyl aminopeptidase], LOC400590 [hypothetical LOC400590], LOC646021 [similar to hCG 1774990], LOC646030 [similar to hCG 1991475], LOC646627 [phospholipase inhibitor], LOR [loricrin], LOX [lysyl oxidase], LOXL1 [lysyl oxidase-like 1], LPA [lipoprotein, Lp(a)], LPL [lipoprotein lipase], LPO [lactoperoxidase], LPP [LIM domain containing preferred translocation partner in lipoma], LPPR1 [lipid phosphate phosphatase-related protein type 1], LPPR3 [lipid phosphate phosphatase-related protein type 3], LPPR4 [lipid phosphate phosphatase-related protein type 4], LPXN [leupaxin], LRP1 [low density lipoprotein receptor-related protein 1], LRP6 [low density lipoprotein receptor-related protein 6], LRP8 [low density lipoprotein receptor-related protein 8, apolipoprotein e receptor], LRPAP1 [low density lipoprotein receptor-related protein associated protein 1], LRPPRC [leucine-rich PPR-motif containing], LRRC37B [leucine rich repeat containing 37B], LRRC4C [leucine rich repeat containing 40], LRRTM1 [leucine rich repeat transmembrane neuronal 1], LSAMP [limbic system-associated membrane protein], LSM2 [LSM2 homolog, U6 small nuclear RNA associated (S. cerevisiae)], LSS [lanosterol synthase (2 [3-oxidosqualene-lanosterol cyclase)], LTA [lymphotoxin alpha (TNF superfamily, member 1)], LTA4H [leukotriene A4 hydrolase], LTBP1 [latent transforming growth factor beta binding protein 1], LTBP4 [latent transforming growth factor beta binding protein 4], LTBR [lymphotoxin beta receptor (TNFR superfamily, member 3)], LTC4S [leukotriene C4 synthase], LTF [lactotransferrin], LY96 [lymphocyte antigen 96], LYN [v-yes-1 Yamaguchi sarcoma viral related oncogene homolog], LYVE [lymphatic vessel endothelial hyaluronan receptor 1], M6PR [mannose-6-phosphate receptor (cation dependent)], MAB21L1 [mab-21-like 1 (C. elegans)], MAB21 L2 [mab-2′-like 2 (C. elegans)], MAF [v-mafmusculoaponeurotic fibrosarcoma oncogene homolog (avian)], MAG [myelin associated glycoprotein], MAGEA1 [melanoma antigen family A, 1 (directs expression of antigen MZ2-E)], MAGEL2 [MAGE-like 2], MAL [mal, T-cell differentiation protein], MAML2 [mastermind-like 2 (Drosophila)], MAN2A1 [mannosidase, alpha, class 2A, member 1], MANBA [mannosidase, beta A, lysosomal], MANF [mesencephalic astrocyte-derived neurotrophic factor], MAOA [monoamine oxidase A], MAOB [monoamine oxidase B], MAP1B [microtubule-associated protein 1B], MAP2 [microtubule-associated protein 2], MAP2K1 [mitogen-activated protein kinase kinase 1], MAP2K2 [mitogen-activated protein kinase kinase 2], MAP2K3 [mitogen-activated protein kinase kinase 3], MAP2K4 [mitogen-activated protein kinase kinase 4], MAP3K1 [mitogen-activated protein kinase kinase kinase 1], MAP3K12 [mitogen-activated protein kinase kinase kinase 12], MAP3K13 [mitogen-activated protein kinase kinase kinase 13], MAP3K14 [mitogen-activated protein kinase kinase kinase 14], MAP3K4 [mitogen-activated protein kinase kinase kinase 4], MAP3K7 [mitogen-activated protein kinase kinase kinase 7], MAPK1 [mitogen-activated protein kinase 1], MAPK10 [mitogen-activated protein kinase 10], MAPK14 [mitogen-activated protein kinase 14], MAPK3 [mitogen-activated protein kinase 3], MAPK8 [mitogen-activated protein kinase 8], MAPK81P2 [mitogen-activated protein kinase 8 interacting protein 2], MAPK81P3 [mitogen-activated protein kinase 8 interacting protein 3], MAPK9 [mitogen-activated protein kinase 9], MAPKAPK2 [mitogen-activated protein kinase-activated protein kinase 2], MAPKSP1 [MAPK scaffold protein 1], MAPRE3 [microtubule-associated protein, RP/EB family, member 3], MAPT [microtubule-associated protein tau], MARCKS [myristoylated alanine-rich protein kinase C substrate], MARK1 [MAP/microtubule affinity-regulating kinase 1], MARK2 [MAP/microtubule affinity-regulating kinase 2], MAT2A [methionine adenosyltransferase II, alpha], MATR3 [matrin 3], MAX [MYC associated factor X], MAZ [MYC-associated zinc finger protein (purine-binding transcription factor)], MB [myoglobin], MBD1 [methyl-CpG binding domain protein 1], MBD2 [methyl-CpG binding domain protein 2], MBD3 [methyl-CpG binding domain protein 3], MBD4 [methyl-CpG binding domain protein 4], MBL2 [mannose-binding lectin (protein C) 2, soluble (opsonic defect)], MBP [myelin basic protein], MBTPS1 [membrane-bound transcription factor peptidase, site 1], MC1R [melanocortin 1 receptor (alpha melanocyte stimulating hormone receptor)], MC3R [melanocortin 3 receptor], MC4R [melanocortin 4 receptor], MCCC2 [methylcrotonoyl-Coenzyme A carboxylase 2 (beta)]. MCF2L [MCF.2 cell line derived transforming sequence-like], MCHR1 [melanin-concentrating hormone receptor 1], MCL1 [myeloid cell leukemia sequence 1 (BCL2-related)], MCM7 [minichromosome maintenance complex component 7], MCPH1 [microcephalin 1], MDC1 [mediator of DNA-damage checkpoint 1], MDFIC [MyoD family inhibitor domain containing], MDGA1 [MAM domain containing glycosylphosphatidylinositol anchor 1], MDK [midkine (neurite growth-promoting factor 2)], MDM2 [Mdm2 p53 binding protein homolog (mouse)], ME2 [malic enzyme 2, NAD(+)-dependent, mitochondrial], MECP2 [methyl CpG binding protein 2 (Rett syndrome)], MED1 [mediator complex subunit 1], MED12 [mediator complex subunit 12], MED24 [mediator complex subunit 24], MEF2A [myocyte enhancer factor 2A], MEF2C [myocyte enhancer factor 20], MEISI [Meis homeobox 1], MEN1 [multiple endocrine neoplasia 1], MERTK [c-mer proto-oncogene tyrosine kinase], MESP2 [mesoderm posterior 2 homolog (mouse)], MEST [mesoderm specific transcript homolog (mouse)], MET [met proto-oncogene (hepatocyte growth factor receptor)], METAP2 [methionyl aminopeptidase 2], METRN [meteorin, glial cell differentiation regulator], MFSD6 [major facilitator superfamily domain containing 6], MGAT2 [mannosyl (alpha-1 [6-)-glycoprotein beta-1 [2-N-acetylglucosaminyltransferase], MGMT [0-6-methylguanine-DNA methyltransferase], MGP [matrix Gla protein], MGST1 [microsomal glutathione S-transferase 1], MICA [MHC class I polypeptide-related sequence A], MICAL1 [microtubule associated monoxygenase, calponin and LTM domain containing 1], MICB [MHC class T polypeptide-related sequence B], MIF [macrophage migration inhibitory factor (glycosylation-inhibiting factor)], MITF [microphthalmia-associated transcription factor], MK167 [antigen identified by monoclonal antibody Ki-67], MKKS [McKusick-Kaufman syndrome], MKNK1 [MAP kinase interacting serine/threonine kinase 1], MKRN3 [makorin ring finger protein 3], MKS1 [Meckel syndrome, type 1], MLH1 [mutL homolog 1, colon cancer, nonpolyposis type 2 (E. coli)], MLL [myeloid/lymphoid or mixed-lineage leukemia (trithorax homolog. Drosophila)], MLLT4 [myeloid/lymphoid or mixed-lineage leukemia (trithorax homolog, Drosophila); translocated to, 4], MLPH [mclanophilin], MLX [MAX-like protein X], MLXIPL [MLX interacting protein-like], MME [membrane metallo-endopeptidase], MMP1 [matrix metallopeptidase 1 (interstitial collagenase)], MMP10 [matrix metallopeptidase 10 (stromelysin 2)], MMP12 [matrix metallopeptidase 12 (macrophage elastase)], MMP13 [matrix metallopeptidase 13 (collagenase 3)], MMP14 [matrix metallopeptidase 14 (membrane-inserted)], MMP2 [matrix metallopeptidase 2 (gelatinase A, 72 kDa gelatinase, 72 kDa type IV collagenase)], MMP24 [matrix metallopeptidase 24 (membrane-inserted)], MMP26 [matrix metallopeptidase 26], MMP3 [matrix metallopeptidase 3 (stromelysin1, progelatinase)], MMP7 [matrix metallopeptidase 7 (matrilysin, uterine)], MMP8 [matrix metallopeptidase 8 (neutrophil collagenase)], MMP9 [matrix metallopeptidase 9 (gelatinase B, 92 kDa gelatinase, 92 kDa type IV collagenase)], MN1 [meningioma (disrupted in balanced translocation) 1], MNAT1 [menage a trois homolog 1, cyclin H assembly factor (Xenopus laevis)], MNX1 [motor neuron and pancreas homeobox 1], MOG [myelin oligodendrocyte glycoprotein], MPL [myeloproliferative leukemia virus oncogene], MPO [myeloperoxidase], MPP1 [membrane protein, palmitoylated 1, 55 kDa], MPZL1 [myelin protein zero-like 1], MR1 [major histocompatibility complex, class-related], MRAP [melanocortin 2 receptor accessory protein], MRAS [muscle RAS oncogene homolog], MRC1 [mannose receptor, C type 1], MRGPRX1 [MAS-related GPR, member X1], MS4A1 [membrane-spanning 4-domains, subfamily A, member 1], MSH2 [mutS homolog 2, colon cancer, nonpolyposis type 1 (E. coli)], MSH3 [mutS homolog 3 (E. coli)], MSI1 [musashi homolog 1 (Drosophila)], MSN [moesin], MSR1 [macrophage scavenger receptor 1], MSTN [myostatin], MSX1 [rnsh homeobox 1], MSX2 [msh homeobox 2], MT2A [metallothionein 2A], MT3 [metallothionein 3], MT-ATP6 [mitochondrially encoded ATP synthase 6], MT-001 [mitochondrially encoded cytochrome c oxidase I], MT-C02 [mitochondrially encoded cytochrome c oxidase II], MT-C03 [mitochondrially encoded cytochrome c oxidase III], MTF1 [metal-regulatory transcription factor 1], MTHFD1 [methylenetetrahydrofolate dehydrogenase (NADP+ dependent) 1, methenyltetrahydrofolate cyclohydrolase, formyltetrahydrofolate synthetase], MTHFD1L [methylenetetrahydrofolate dehydrogenase (NADP+ dependent) 1-like], MTHFR [5 [10-methylenetetrahydrofolate reductase (NADPH)], MTL5 [metallothionein-like 5, testis-specific (tesmin)], MTMR14 [myotubularin related protein 14], MT-ND6 [mitochondrially encoded NADH dehydrogenase 6], MTNR1A [melatonin receptor 1A], MTNR1B [melatonin receptor 1B], MTOR [mechanistic target of rapamycin (serine/threonine kinase)], MTR [5-methyltetrahydrofolate-homocysteine methyltransferase], MTRR [5-methyltetrahydrofolate-homocysteine methyltransferase reductase], MTTP [microsomal triglyceride transfer protein], MUC1 [mucin 1, cell surface associated], MUCI6 [mucin 16, cell surface associated], MUC19 [mucin 19, oligomeric], MUC2 [mucin 2, oligomeric mucus/gel-forming], MUC3A [mucin 3A, cell surface associated], MUC5AC [mucin 5AC, oligomeric mucus/gel-forming], MUSK [muscle, skeletal, receptor tyrosine kinase], MUT [methylmalonyl Coenzyme A mutase], MVK [mevalonate kinase], MVP [major vault protein], MX1 [myxovirus (influenza virus) resistance 1, interferon-inducible protein p78 (mouse)], MXD1 [MAX dimerization protein 1], MXI1 [MAX interactor 1], MYB [v-myb myeloblastosis viral oncogene homolog (avian)], MYC [v-myc myelocytomatosis viral oncogene homolog (avian)], MYCBP2 [MYC binding protein 2], MYCN [v-myc myclocytomatosis viral related oncogene, neuroblastoma derived (avian)], MYD88 [myeloid differentiation primary response gene (88)], MYF5 [myogenic factor 5], MYH10 [myosin, heavy chain 10, non-muscle], MYH14 [myosin, heavy chain 14, non-muscle], MYH7 [myosin, heavy chain 7, cardiac muscle, beta], MYL1 [myosin, light chain 1, alkali; skeletal, fast], MYL10 [myosin, light chain 10, regulatory], MYL12A [myosin, light chain 12A, regulatory, non-sarcomeric], MYL12B [myosin, light chain 12B, regulatory], MYL2 [myosin, light chain 2, regulatory, cardiac, slow], MYL3 [myosin, light chain 3, alkali; ventricular, skeletal, slow], MYL4 [myosin, light chain 4, alkali; atrial, embryonic], MYL5 [myosin, light chain 5, regulatory], MYL6 [myosin, light chain 6, alkali, smooth muscle and non-muscle], MYL6B [myosin, light chain 6B, alkali, smooth muscle and non-muscle], MYL7 [myosin, light chain 7, regulatory], MYL9 [myosin, light chain 9, regulatory], MYLK [myosin light chain kinase], MYLPF [myosin light chain, phosphorylatable, fast skeletal muscle], MYOID [myosin 1D], MYOSA [myosin VA (heavy chain 12, myoxin)], MYOC [myocilin, trabecular meshwork inducible glucocorticoid response], MYOD1 [myogenic differentiation 1], MYOG [myogenin (myogenic factor 4)], MYOM2 [myomesin (M-protein) 2, 165 kDa], MYST3 [MYST histone acetyltransferase (monocytic leukemia) 3], NACA [nascent polypeptide-associated complex alpha subunit], NAGLU [N-acetylglucosaminidase, alpha-], NAIP [NLR family, apoptosis inhibitory protein], NAMPT [nicotinamide phosphoribosyltransferase], NANOG [Nanog homeobox], NANS [N-acetylneuraminic acid synthase], NAP1L2 [nucleosome assembly protein 1-like 2], NAPA [N-ethylmaleimide-sensitive factor attachment protein, alpha], NAPG [N-ethylmaleimide-sensitive factor attachment protein, gamma], NAT2 [N-acetyltransferase 2 (arylamine N-acetyltransferase)], NAV1 [neuron navigator 1], NAV3 [neuron navigator 3], NBEA [neurobcachin], NCALD [neurocalcin delta], NCAM1 [neural cell adhesion molecule 1], NCAM2 [neural cell adhesion molecule 2], NCF1 [neutrophil cytosolic factor 1], NCF2 [neutrophil cytosolic factor 2], NCK1 [NCK adaptor protein 1], NCK2 [NCK adaptor protein 2], NCKAP1 [NCK-associated protein 1], NCL [nucleolin], NCOA2 [nuclear receptor coactivator 2], NCOA3 [nuclear receptor coactivator 3], NCOR1 [nuclear receptor co-repressor 1], NCOR2 [nuclear receptor co-repressor 2], NDE1 [nudE nuclear distribution gene E homolog 1 (A. nidulans)], NDEL1 [nudE nuclear distribution gene E homolog (A. nidulans)-like 1], NDN [necdin homolog (mouse)], NDNL2 [necdin-like 2], NDP [Norrie disease (pseudoglioma)], NDUFA1 [NADH dehydrogenase (ubiquinone) 1 alpha subcomplex, 1, 7.5 kDa], NDUFAB1 [NADH dehydrogenase (ubiquinone) 1, alpha/beta subcomplex, 1, 8 kDa], NDUFS3 [NADH dehydrogenase (ubiquinone) Fe—S protein 3, 30 kDa (NADH-coenzyme Q reductase)], NDUFV3 [NADH dehydrogenase (ubiquinone) flavoprotein 3, 10 kDa], NEDD4 [neural precursor cell expressed, developmentally down-regulated 4], NEDD4L [neural precursor cell expressed, developmentally down-regulated 4-like], NEFH [neurofilament, heavy polypeptide], NEFL [neurofilament, light polypeptide], NEFM [neurofilament, medium polypeptide], NENF [neuron derived neurotrophic factor], NEO1 [neogenin homolog 1 (chicken)], NES [nestin], NET1 [neuroepithelial cell transforming 1], NEU1 [sialidase 1 (lysosomal sialidase)], NEU3 [sialidase 3 (membrane sialidase)], NEUROD1 [neurogenic differentiation 1], NEUROD4 [neurogenic differentiation 4], NEUROG1 [neurogenin 1], NEUROG2 [neurogenin 2], NF1 [neurofibromin 1], NF2 [neurofibromin 2 (merlin)], NFASC [neurofascin homolog (chicken)], NFAT5 [nuclear factor of activated T-cells 5, tonicity-responsive], NFATC1 [nuclear factor of activated T-cells, cytoplasmic, calcineurin-dependent 1], NFATC2 [nuclear factor of activated T-cells, cytoplasmic, calcineurin-dependent 2], NFATC3 [nuclear factor of activated T-cells, cytoplasmic, calcineurin-dependent 3], NFATC4 [nuclear factor of activated T-cells, cytoplasmic, calcineurin-dependent 4], NFE2L2 [nuclear factor (erythroid-derived 2)-like 2], NFIC [nuclear factor I/C (CCAAT-binding transcription factor)], NFIL3 [nuclear factor, interleukin 3 regulated], NFKB1 [nuclear factor of kappa light polypeptide gene enhancer in B-cells 1], NFKB2 [nuclear factor of kappa light polypeptide gene enhancer in B-cells 2 (p49/p100)], NFKB1A [nuclear factor of kappa light polypeptide gene enhancer in B-cells inhibitor, alpha], NFKB1B [nuclear factor of kappa light polypeptide gene enhancer in B-cells inhibitor, beta], NFKB1L1 [nuclear factor of kappa light polypeptide gene enhancer in B-cells inhibitor-like 1], NFYA [nuclear transcription factorY, alpha], NFYB [nuclear tran cription factorY, beta], NGEF [neuronal guanine nucleotide exchange factor], NGF [nerve growth factor (beta polypeptide)], NGFR [nerve growth factor receptor (TNFR superfamily, member 16)], NGFRAP1 [nerve growth factor receptor (TNFRSF16) associated protein 1], NHLRC1 [NHL repeat containing 1], NINJ1 [ninjurin 1], NINJ2 [ninjurin 2], NIP7 [nuclear import 7 homolog (S. cerevisiae)], NIPA1 [non imprinted in Prader-Willi/Angelman syndrome 1], NIPA2 [non imprinted in Prader-Willi/Angelman syndrome 2], NIPAL1 [NIPA-like domain containing 1], NIPAL4 [NIPA-like domain containing 4], NIPSNAP1 [nipsnap homolog 1 (C. elegans)], NISCH [nischarin], NIT2 [nitrilase family, member 2], NKX2-1 [NK2 homeobox 1], NKX2-2 [NK2 homeobox 2], NLGN1 [neuroligin 1], NLGN2 [neuroligin 2], NLGN3 [neuroligin 3], NLGN4X [neuroligin 4, X-linked], NLGN4Y [neuroligin 4, Y-linked], NLRP3 [NLR family, pyrin domain containing 3], NMB [neuromedin B], NME1 [non-metastatic cells 1, protein (NM23A) expressed in], NME2 [non-metastatic cells 2, protein (NM23B) expressed in], NME4 [non-metastatic cells 4, protein expressed in], NNAT [neuronatin], NOD1 [nucleotide-binding oligomerization domain containing 1], NOD2 [nucleotide-binding oligomerization domain containing 2], NOG [noggin], NOL6 [nucleolar protein family 6 (RNA-associated)], NOS1 [nitric oxide synthase 1 (neuronal)], NOS2 [nitric oxide synthase 2, inducible], NOS3 [nitric oxide synthase 3 (endothelial cell)], NOSTRIN [nitric oxide synthase trafficker], NOTCH1 [Notch homolog 1, translocation-associated (Drosophila)], NOTCH2 [Notch homolog 2 (Drosophila)], NOTCH3 [Notch homolog 3 (Drosophila)], NOV [nephroblastoma overexpressed gene], NOVA1 [neuro-oncological ventral antigen 1], NOVA2 [neuro-oncological ventral antigen 2], NOX4 [NADPH oxidase 4], NPAS4 [neuronal PAS domain protein 4], NPFF [neuropeptide FF-amide peptide precursor], NPHP1 [nephronophthisis 1 (juvenile)], NPHP4 [nephronophthisis 4], NPHS1 [nephrosis 1, congenital, Finnish type (nephrin)], NPM1 [nucleophosmin (nucleolar phosphoprotein B23, numatrin)], NPPA [natriuretic peptide precursor A], NPPB [natriuretic peptide precursor B], NPPC [natriuretic peptide precursor C], NPR1 [natriuretic peptide receptor A/guanylate cyclase A (atrionatriuretic peptide receptor A)], NPR3 [natriuretic peptide receptor C/guanylate cyclase C (atrionatriuretic peptide receptor C)], NPRL2 [nitrogen permease regulator-like 2 (S. cerevisiae)], NPTX1 [neuronal pentraxin 1], NPTX2 [neuronal pentraxin II], NPY [neuropeptide Y], NPY1R [neuropeptide Y receptor Y1], NPY2R [neuropeptide Y receptor Y2], NPY5R [neuropeptide Y receptor Y5], NQO1 [NAD(P)H dehydrogenase, quinone 1], NQO2 [NAD(P)H dehydrogenase, quinone 2], NROB1 [nuclear receptor subfamily 0, group B, member 1], NROB2 [nuclear receptor subfamily 0, group B, member 2], NR1H3 [nuclear receptor subfamily 1, group H, member 3], NR1H4 [nuclear receptor subfamily 1, group H, member 4], NR1I2 [nuclear receptor subfamily 1, group 1, member 2], NR1I3 [nuclear receptor subfamily 1, group 1, member 3], NR2C1 [nuclear receptor subfamily 2, group C, member 1], NR2C2 [nuclear receptor subfamily 2, group C, member 2], NR2E1 [nuclear receptor subfamily 2, group E, member 1], NR2F1 [nuclear receptor subfamily 2, group F, member 1], NR2F2 [nuclearreceptor subfamily 2, group F, member 2], NR3C1 [nuclear receptor subfamily 3, group C, member 1 (glucocorticoid receptor)], NR3C2 [nuclear receptor subfamily 3, group C, member 2], NR4A2 [nuclear receptor subfamily 4, group A, member 2], NR4A3 [nuclear receptor subfamily 4, group A, member 3], NR5A1 [nuclear receptor subfamily 5, group A, member 1], NR6A1 [nuclear receptor subfamily 6, group A, member 1], NRAS [neuroblastoma RAS viral (v-ras) oncogene homolog], NRCAM [neuronal cell adhesion molecule], NRD1 [nardilysin (N-arginine dibasic convertase)], NRF1 [nuclear respiratory factor 1], NRG1 [neuregulin 1], NRIP1 [nuclear receptor interacting protein 1], NRN1 [neuritin 1], NRP1 [neuropilin 1], NRP2 [neuropilin 2], NRSN1 [neurensin 1], NRTN [nerniurin], NRXN1 [neurexin 1], NRXN3 [neurexin 3], NSD1 [nuclear receptor binding SET domain protein 1], NSF [N-ethylmaleimide-sensitive factor], NSUN5 [NOP2/Sun domain family, member 5], NT5E [5′-mucleotidase, ecto (CD73)], NTF3 [neurotrophin 3], NTF4 [neurotrophin 4], NTHL1 [nth endonuclease III-like 1 (E. coli)], NTN1 [netrin 1], NTN3 [netrin 3], NTN4 [netrin 4], NTNG1 [netrin G1], NTRK1 [neurotrophic tyrosine kinase, receptor, type 1], NTRK2 [neurotrophic tyrosine kinase, receptor, type 2], NTRK3 [neurotrophic tyrosine kinase, receptor, type 3], NTS [neurotensin], NTSR1 [neurotensin receptor 1 (high affinity)], NUCB2 [nucleobindin 2], NUDC [nuclear distribution gene C homolog (A. nidulans)], NUDT6 [nudix (nucleoside diphosphate linked moiety X)-type motif 6], NUDT7 [nudix (nucleoside diphosphate linked moiety X)-type motif7], NUMB [numb homolog (Drosophila)], NUP98 [nucleoporin 98 kDa], NUPR1 [nuclear protein, transcriptional regulator, 1], NXF1 [nuclear RNA export factor 1], NXNL1 [nucleoredoxin-like 1], OAT [ornithine aminotransferase], OCA2 [oculocutaneous albinism II], OCLN [occludin], OCM [oncomodulin], ODC1 [ornithine decarboxylase 1], OFD1 [oral-facial-digital syndrome 1], OGDH [oxoglutarate (alpha-ketoglutarate) dehydrogenase (lipoamide)], OLA1 [Obg-like ATPase 1], OLIG1 [oligodendrocyte transcription factor 1], OLTG2 [oligodendrocyte lineage transcription factor 2], OLR1 [oxidized low density lipoprotein (lectin-like) receptor 1], OMG [oligodendrocyte myelin glycoprotein], OPHN1 [oligophrenin 1], OPN1SW [opsin 1 (cone pigments), short-wave-sensitive], OPRD1 [opioid receptor, delta 1], OPRK1 [opioid receptor, kappa 1], OPRL1 [opiate receptor-like 1], OPRM1 [opioid receptor, mu 1], OPTN [optineurin], OSBP [oxysterol binding protein], OSBPL10 [oxysterol binding protein-like 10], OSBPL6 [oxysterol binding protein-like 6], OSM [oncostatinM], OTC [ornithine carbamoyltransferase], OTX2 [orthodenticle homeobox 2], OXA1L [oxidase (cytochrome c) assembly 1-like], OXT [oxytocin, prepropeptide], OXTR [oxytocin receptor], P2RX7 [purinergic receptor P2X, ligand-gated ion channel, 7], P2RY1 [purinergic receptor P2Y, G-protein coupled, 1], P2RY12 [purinergic receptor P2Y, G-protein coupled, 12], P2RY2 [purinergic receptor P2Y, G-protein coupled, 2], P4HB [proly14-hydroxylase, beta polypeptide], PABPC1 [poly(A) binding protein, cytoplasmic 1], PADI4 [peptidyl arginine deiminase, type IV], PAEP [progestagen-associated endometrial protein]. PAFAHIB1 [platelet-activating factor acetylhydrolase 1b, regulatory subunit 1 (45 kDa)], PAFAH1B2 [platelet-activating factor acetylhydrolase 1b, catalytic subunit 2 (30 kDa)], PAG1 [phosphoprotein associated with glycosphingolipid microdomains 1], PAH [phenylalanine hydroxylase], PAK1 [p21 protein (Cdc42/Rac)-activated kinase 1], PAK2 [p21 protein (Cdc42/Rac)-activated kinase 2], PAK3 [p21 protein (Cdc42/Rac)-activated kinase 3], PAK-4 [p21 protein (Cdc42Rac)-activated kinase 4], PAK6 [p21 protein (Cdc42/Rac)-activated kinase 6], PAK7 [p21 protein (Cdc42/Rac)-activated kinase 7], PAPPA [pregnancy-associated plasma protein A, pappalysin 1], PAPPA2 [pappalysin 2], PARD6A [par-6 partitioning defective 6 homolog alpha (C. elegans)], PARG [poly (ADP-ribose) glycohydrolase], PARK2 [Parkinson disease (autosomal recessive, juvenile) 2, parkin], PARK7 [Parkinson disease (autosomal recessive, early onset) 7], PARN [poly(A)-specific ribonuclease (deadenylation nuclease)], PARP1 [poly (ADP-ribose) polymerase 1], PAWR [PRKC, apoptosis, WT1, regulator], PAX2 [paired box 2], PAX3 [paired box 3], PAX5 [paired box 5], PAX6 [paired box 6], PAX7 [paired box 7], PBX1 [pre-B-cellleukemia homeobox 1], PC [pyruvate carboxylase], PCDH10 [protocadherin 10], PCDH19 [protocadherin 19], PCDHA12 [protocadherin alpha 12], PCK2 [phosphoenolpyruvate carboxykinase 2 (mitochondrial)], POLO [piccolo (presynaptic cytomatrix protein)], PCM1 [pericentriolar material 1], PCMT1 [protein-L-isoaspartate (D-aspartate)O-methyltransferase], PCNA [proliferating cell nuclear antigen], PCNT [pericentrin], PCP4 [Purkinje cell protein 4], PCSK7 [proprotein convertase subtilisin/kexin type 7], PDCD1 [programmed cell death 1], PDE11A [phosphodiesterase 11A], PDE3B [phosphodiesterase 3B, cGMP-inhibited], PDE4A [phosphodiesterase 4A, cAMP-specific (phosphodiesterase E2 dunce homolog, Drosophila)], PDE4B [phosphodiesterase 4B, cAMP-specific (phosphodiesterase E4 dunce homolog, Drosophila)], PDE4D [phosphodiesterase 4D, cAMP-specific (phosphodiesterase E3 dunce homolog, Drosophila)], PDE5A [phosphodiesterase 5A, cGMP-specific], PDE8A [phosphodiesterase 8A], PDGFA [platelet-derived growth factor alpha polypeptide], PDGFB [platelet-derived growth factor beta polypeptide (simian sarcoma viral (v-sis) oncogene homolog)], PDGFC [platelet derived growth factor C], PDGFD [platelet derived growth factor D], PDGFRA [platelet-derived growth factor receptor, alpha polypeptide], PDGFRB [platelet-derived growth factor receptor, beta polypeptide], PDHA1 [pyruvate dehydrogenase (lipoamide) alpha 1], PDIA2 [protein disulfide isomerase family A, member 2], PDIA3 [protein disulfide isomerase family A, member 3], PDLIM1 [PDZ and LIM domain 1], PDLIM7 [PDZ and LIM domain 7 (enigma)], PDP1 [pyruvate dehyrogenase phosphatase catalytic subunit 1], PDPN [podoplanin], PDXK [pyridoxal (pyridoxine, vitamin B6) kinase], PDXP [pyridoxal (pyridoxine, vitamin B6) phosphatase], PDYN [prodynorphin], PDZK1 [PDZ domain containing 1], PEBP1 [phosphatidylethanolamine binding protein 1], PECAM1 [platelet/endothelial cell adhesion molecule], PENK [proenkephalin], PER1 [period homolog 1 (Drosophila)], PER2 [period homolog 2 (Drosophila)], PEX13 [peroxisomal biogenesis factor 13], PEX2 [peroxisomal biogenesis factor 2], PEX5 [peroxisomal biogenesis factor 5], PEX7 [peroxisomal biogenesis factor 7], PF4 [platelet factor 4], PFAS [phosphoribosylformylglycinamidine synthase], PFKL [phosphofructokinase, liver], PFKM [phosphofructokinase, muscle], PFN1 [profilin 1], PFN2 [profilin 2], PFN3 [profilin 3], PFN4 [profiling family, member 4], PGAM2 [phosphoglycerate mutase 2 (muscle)], PGD [phosphogluconate dehydrogenase], PGF [placental growth factor], PGK1 [phosphoglycerate kinase 1], PGM1 [phosphoglucomutase 1], PGR [progesterone receptor], PHB [prohibitin], PHEX [phosphate regulating endopeptidase homolog, X-linked], PHF10 [PHD finger protein 10], PHF8 [PHD finger protein 8], PHGDH [phosphoglycerate dehydrogenase], PHKA2 [phosphorylase kinase, alpha 2 (liver)], PHLDA2 [pleckstrin homology-like domain, family A, member 2], PHOX2B [paired-like homeobox 2b], PHYH [phytanoyl-CoA 2-hydroxylase], PHYHIP [phytanoyl-CoA 2-hydroxylase interacting protein], PIAS1 [protein inhibitor of activated STAT, 1], PICALM [phosphatidylinositol binding clathrin assembly protein], PIGF [phosphatidylinositol glycan anchor biosynthesis, class F], PIGP [phosphatidylinositol glycan anchor biosynthesis, class P], PIK3C2A [phosphoinositide-3-kinase, class 2, alpha polypeptide], PIK3C2B [phosphoinositide-3-kinase, class 2, beta polypeptide], PIK3C2G [phosphoinositide-3-kinase, class 2, gamma polypeptide], PIK3C3 [phosphoinositide-3-kinase, class 3], PIK3CA [phosphoinositide-3-kinase, catalytic, alpha polypeptide], PIK3CB [phosphoinositide-3-kinase, catalytic, beta polypeptide], PIK3CD [phosphoinositide-3-kinase, catalytic, delta polypeptide], PIK3CG [phosphoinositide-3-kinase, catalytic, gamma polypeptide], PIK3R1 [phosphoinositide-3-kinase, regulatory subunit 1 (alpha)], PIK3R2 [phosphoinositide-3-kinase, regulatory subunit 2 (beta)], PIK3R3 [phosphoinositide-3-kinase, regulatory subunit 3 (gamma)], PIK3R4 [phosphoinositide-3-kinase, regulatory subunit 4], PIK3R5 [phosphoinositide-3-kinase, regulatory subunit 5], PINK1 [PTEN induced putative kinase 1], PITX1 [paired-like homeodomain 1], PITX2 [paired-like homeodomain 2], PITX3 [paired-like homeodomain 3]. PKD1 [polycystic kidney disease 1 (autosomal dominant)], PKD2 [polycystic kidney disease 2 (autosomal dominant)], PKHD1 [polycystic kidney and hepatic disease 1 (autosomal recessive)], PKLR [pyruvate kinase, liver and RBC], PKN2 [protein kinase N2], PKNOX1 [PBX/knotted 1 homeobox 1], PL-5283 [PL-5283 protein], PLA2G10 [phospholipase A2, group X], PLA2G2A [phospholipase A2, group IIA (platelets, synovial fluid)], PLA2G4A [phospholipase A2, group IVA (cytosolic, calcium-dependent)], PLA2G6 [phospholipase A2, group VI (cytosolic, calcium-independent)], PLA2G7 [phospholipase A2, group VII (platelet-activating factor acetylhydrolase, plasma)], PLAC4 [placenta-specific 4], PLAG1 [pleiomorphic adenoma gene 1], PLAGL1 [pleiomorphic adenoma gene-like 1], PLAT [plasminogen activator, tissue], PLAU [plasminogen activator, urokinase], PLAUR [plasminogen activator, urokinase receptor], PLCB1 [phospholipase C, beta 1 (phosphoinositide-specific)], PLCB2 [phospholipase C, beta 2], PLCB3 [phospholipase C, beta 3 (phosphatidylinositol-specific)], PLCB4 [phospholipase C, beta 4], PLCG1 [phospholipase C, gamma 1], PLCG2 [phospholipase C, gamma 2 (phosphatidylinositol-specific)], PLCL1 [phospholipase C-like 1], PLD1 [phospholipase D1, phosphatidylcholinc-specific], PLD2 [phospholipase D2], PLEK [pleckstrin], PLEKHH1 [pleckstrin homology domain containing, family H (with MyTH4 domain) member 1], PLG [plasminogen], PLIN1 [perilipin 1], PLK1 [polo-like kinase 1 (Drosophila)], PLOD1 [procollagen-lysine 1,2-oxoglutarate 5-dioxygenase 1], PLP1 [proteolipid protein 1], PLTP [phospholipid transfer protein], PLXNA1 [plexin A1], PLXNA2 [plexin A2], PLXNA3 [plexin A3], PLXNA4 [plexin A4], PLXNB1 [plexin B1], PLXNB2 [plexin B2], PLXNB3 [plexin B3], PLXNC1 [plexin C1], PLXND1 [plexin D1], PML [promyelocytic leukemia], PMP2 [peripheral myelin protein 2], PMP22 [peripheral myelin protein 22], PMS2 [PMS2 postmeiotic segregation increased 2 (S. cerevisiae)], PMVK [phosphomevalonate kinase], PNOC [prepronociceptin], PNP [purine nucleoside phosphorylase], PNPLA6 [patatin-like phospholipase domain containing 6], PNPO [pyridoxamine 5′-phosphate oxidase], POFUT2 [protein O-fucosyltransferase 2], POLB [polymerase (DNA directed), beta], POLR1C [polymerase (RNA) 1 polypeptide C, 30 kDa], POLR2A [polymerase (RNA) II (DNA directed) polypeptide A, 220 kDa], POLR3K [polymerase (RNA) III (DNA directed) polypeptide K, 12.3 kDa], POM121C [POM121 membrane glycoprotein C], POMC [proopiomelanocortin], POMGNT1 [protein O-linked mannose beta1[2-N-acetylglucosaminyltransferase], POMT1 [protein-O-mannosyltransferase 1], PON1 [paraoxonase 1], PON2 [paraoxonase 2], POR [P450 (cytochrome) oxidoreductase], POSTN [periostin, osteoblast specific factor], POUIF1 [POU class 1 homeobox 1], POU2F1 [POU class 2 homeobox 1], POU3F4 [POU class 3 homeobox 4], POU4F1 [POU class 4 homeobox 1], POU4F2 [POU class 4 homeobox 2], POU4F3 [POU class 4 homeobox 3], POU5F1 [POU class 5 homeobox 1], PPA1 [pyrophosphatase (inorganic) 1], PPARA [peroxisome proliferator-activated receptor alpha], PPARD [peroxisome proliferator-activated receptor delta], PPARG [peroxisome proliferator-activated receptor gamma], PPARGCIA [peroxisome proliferator-activated receptor gamma, coactivator 1 alpha], PPAT [phosphoribosyl pyrophosphate amidotransferase], PPBP [pro-platelet basic protein (chemokine (C-X-C motif) ligand 7)], PPFIA1 [protein tyrosine phosphatase, receptor type, f polypeptide (PTPRF), interacting protein (liprin), alpha 1], PPFIA2 [protein tyrosine phosphatase, receptor type, f polypeptide (PTPRF), interacting protein (liprin), alpha 2], PPFIA3 [protein tyrosine phosphatase, receptor type, f polypeptide (PTPRF), interacting protein (liprin), alpha 3], PPFIBP1 [PTPRF interacting protein, binding protein 1 (liprin beta 1)], PPIC [peptidylprolyl isomerase C (cyclophilin C)], PPIG [peptidylprolyl isomerase G (cyclophilin G)], PPP1R15A [protein phosphatase 1, regulatory (inhibitor) subunit 15A], PPP1R1B [protein phosphatase 1, regulatory (inhibitor) subunit 1B], PPP1R9A [protein phosphatase 1, regulatory (inhibitor) subunit 9A], PPP1R9B [protein phosphatase 1, regulatory (inhibitor) subunit 9B], PPP2CA [protein phosphatase 2, catalytic subunit, alpha isozyme], PPP2R4 [protein phosphatase 2A activator, regulatory subunit 4], PPP3CA [protein phosphatase 3, catalytic subunit, alpha isozyme], PPP3CB [protein phosphatase 3, catalytic subunit, beta isozyme], PPP3CC [protein phosphatase 3, catalytic subunit, gamma isozyme], PPP3R1 [protein phosphatase 3, regulatory subunit B, alpha], PPP3R2 [protein phosphatase 3, regulatory subunit B, beta], PPP4C [protein phosphatase 4, catalytic subunit], PPY [pancreatic polypeptide], PQBP1 [polyglutamine binding protein 1], PRAM1 [PML-RARA regulated adaptor molecule 1], PRAME [preferentially expressed antigen in melanoma], PRDM1 [PR domain containing 1, with ZNF domain], PRDM15 [PR domain containing 15], PRDM2 [PR domain containing 2, with ZNF domain], PRDX1 [peroxiredoxin 1], PRDX2 [peroxiredoxin 2], PRDX3 [peroxiredoxin 3], PRDX4 [peroxiredoxin 4], PRDX6 [peroxiredoxin 6], PRF1 [perforin 1 (pore forming protein)], PRKAA1 [protein kinase, AMP-activated, alpha 1 catalytic subunit], PRKAA2 [protein kinase, AMP-activated, alpha 2 catalytic subunit], PRKAB1 [protein kinase, AMP-activated, beta 1 non-catalytic subunit], PRKACA [protein kinase, cAMP-dependent, catalytic, alpha], PRKACB [protein kinase, cAMP-dependent, catalytic, beta], PRKACG [protein kinase, cAMP-dependent, catalytic, gamma], PRKAG1 [protein kinase, AMP-activated, gamma 1 non-catalytic subunit], PRKAG2 [protein kinase, AMP-activated, gamma 2 non-catalytic subunit], PRKAR1A [protein kinase, cAMP-dependent, regulatory, type I, alpha (tissue specific extinguisher 1)], PRKAR1B [protein kinase, cAMP-dependent, regulatory, type I, beta], PRKAR2A [protein kinase, cAMP-dependent, regulatory, type II, alpha], PRKAR2B [protein kinase, cAMP-dependent, regulatory, type 11, beta], PRKCA [protein kinase C, alpha], PRKCB [protein kinase C, beta], PRKCD [protein kinase C, delta], PRKCE [protein kinase C, epsilon], PRKCG [protein kinase C, gamma], PRKCH [protein kinase C, eta], PRKC1 [protein kinase C, iota], PRKCQ [protein kinase C, theta], PRKCZ [protein kinase C, zeta], PRKD1 [protein kinase D1], PRKDC [protein kinase, DNA-activated, catalytic polypeptide], PRKG1 [protein kinase, cGMP-dependent, type I], PRL [prolactin], PRLR [prolactin receptor], PRMT1 [protein arginine methyltransferase 1], PRNP [prion protein], PROC [protein C (inactivator of coagulation factors Va and Villa)], PROCR [protein C receptor, endothelial (EPCR)], PRODH [proline dehydrogenase (oxidase) 1], PROK1 [prokineticin 1], PROK2 [prokineticin 2], PROM1 [prominin 1], PR051 [protein S (alpha)], PRPF40A [PRP40 pre-mRNA processing factor 40 homolog A (S. cerevisiae)], PRPF40B [PRP40 pre-mRNA processing factor 40 homolog B (S. cerevisiae)], PRPH [peripherin], PRPH2 [peripherin 2 (retinal degeneration, slow)], PRPS1 [phosphoribosyl pyrophosphate synthetase 1], PRRG4 [proline rich Gla (G-carboxyglutamic acid) 4 (transmembrane)], PRSS8 [protease, serine, 8], PRTN3 [proteinase 3], PRX [periaxin], PSAP [prosaposin], PSEN1 [presenilin 1], PSEN2 [presenilin 2 (Alzheimer disease 4)], PSG1 [pregnancy specific beta-1-glycoprotein 1], PSTP1 [PC4 and SFRS1 interacting protein 1], PSMA5 [proteasome (prosome, macropain) subunit, alpha type, 5], PSMA6 [proteasome (prosome, macropain) subunit, alpha type, 6], PSMB8 [proteasome (prosome, macropain) subunit, beta type, 8 (large multifunctional peptidase 7)], PSMB9 [proteasome (prosome, macropain) subunit, beta type, 9 (large multifunctional peptidase 2)], PSMC1 [proteasome (prosome, macropain) 26S subunit, ATPase, 1], PSMC4 [proteasome (prosome, macropain) 26S subunit, ATPase, 4], PSMD9 [proteasome (prosome, macropain) 26S subunit, non-ATPase, 9], PSME1 [proteasome (prosome, macropain) activator subunit 1 (PA28 alpha)], PSME2 [proteasome (prosome, macropain) activator subunit 2 (PA28 beta)], PSMG1 [proteasome (prosome, macropain) assembly chaperone 1], PSPH [phosphoserine phosphatase], PSPN [persephin], PSTPIP1 [proline-serine-threonine phosphatase interacting protein 1], PTAFR [platelet-activating factor receptor], PTCH1 [patched homolog 1 (Drosophila)], PTCH2 [patched homolog 2 (Drosophila)], PTEN [phosphatase and tensin homolog], PTF1A [pancreas specific transcription factor, 1a], PTGER1 [prostaglandin E receptor 1 (subtype EPI), 42 kDa], PTGER2 [prostaglandin E receptor 2 (subtype EP2), 53 kDa], PTGER3 [prostaglandin E receptor 3 (subtype EP3)], PTGER4 [prostaglandin E receptor 4 (subtype EP4)], PTGES [prostaglandin E synthase], PTGES2 [prostaglandin E synthase 2], PTGIR [prostaglandin 12 (prostacyclin) receptor (IP)], PTGS1 [prostaglandin-endoperoxide synthase 1 (prostaglandin G/H synthase and cyclooxygenase)], PTGS2 [prostaglandin-endoperoxide synthase 2 (prostaglandin G/H synthase and cyclooxygenase)], PTH [parathyroid hormone], PTH1R [parathyroid hormone 1 receptor], PTHLH [parathyroid hormone-like hormone], PTK2 [PTK2 protein tyrosine kinase 2], PTK2B [PTK2B protein tyrosine kinase 2 beta], PTK7 [PTK7 protein tyrosine kinase 7], PTN [pleiotrophin], PTPN1 [protein tyrosine phosphatase, non-receptor type 1], PTPN11 [protein tyrosine phosphatase, non-receptor type 11], PTPN13 [protein tyrosine phosphatase, non-receptor type 13 (APO-1/CD95 (Fas)-associated phosphatase)], PTPN18 [protein tyrosine phosphatase, non-receptor type 18 (brain-derived)], PTPN2 [protein tyrosine phosphatase, non-receptor type 2], PTPN22 [protein tyrosine phosphatase, non-receptor type 22 (lymphoid)], PTPN6 [protein tyrosine phosphatase, non-receptor type 6], PTPN7 [protein tyrosine phosphatase, non-receptor type 7], PTPRA [protein tyrosine phosphatase, receptor type, A], PTPRB [protein tyrosine phosphatase, receptor type, B], PTPRC [protein tyrosine phosphatase, receptor type, C], PTPRD [protein tyrosine phosphatase, receptor type, D], PTPRE [protein tyrosine phosphatase, receptor type, E], PTPRF [protein tyrosine phosphatase, receptor type, F], PTPRJ [protein tyrosine phosphatase, receptor type, J], PTPRK [protein tyrosine phosphatase, receptor type, K], PTPRM [protein tyrosine phosphatase, receptor type. M], PTPRO [protein tyrosine phosphatase, receptor type, O], PTPRS [protein tyrosine phosphatase, receptor type, S], PTPRT [protein tyrosine phosphatase, receptor type, T], PTPRU [protein tyrosine phosphatase, receptor type, U], PTPRZ1 [protein tyrosine phosphatase, receptor-type, Z polypeptide 1], PTS [6-pyruvoyltetrahydropterin synthase], PTTG1 [pituitary tumor-transforming 1], PVR [poliovirus receptor], PVRL1 [poliovirus receptor-related 1 (herpesvirus entry mediator C)], PWP2 [PWP2 periodic tryptophan protein homolog (yeast)], PXN [paxillin], PYCARD [PYD and CARD domain containing], PYGB [phosphorylase, glycogen; brain], PYGM [phosphorylase, glycogen, muscle], PYY [peptide YY], QDPR [quinoid dihydropteridine reductase], QKI [quaking homolog, KH domain RNA binding (mouse)], RAB11A [RAB11A, member RAS oncogene family], RAB11FIP5 [RAB11 family interacting protein 5 (class I)], RAB39B [RAB39B, member RAS oncogene family], RAB3A [RAB3A, member RAS oncogene family], RAB4A [RAB4A, member RAS oncogene family], RAB5A [RABSA, member RAS oncogene family], RAB8A [RABSA, member RAS oncogene family], RAB9A [RAB9A, member RAS oncogene family], RABEP1 [rabaptin, RAB GTPase binding effector protein 1], RABGEF1 [RAB guanine nucleotide exchange factor (GEF) 1], RAC1 [ras-related C3 botulinum toxin substrate 1 (rho family, small GTP binding protein Rae 1)], RAC2 [ras-related C3 botulinum toxin substrate 2 (rho family, small GTP binding protein Rac2)], RAC3 [ras-related C3 botulinum toxin substrate 3 (rho family, small GTP binding protein Rac3)], RAD51 [RAD51 homolog (RecA homolog, E. coli) (S. cerevisiae)], RAF1 [v-raf-1 murine leukemia viral oncogene homolog 1], RAG1 [recombination activating gene 1], RAG2 [recombination activating gene 2], RAGE [renal tumor antigen], RALA [v-ral simian leukemia viral oncogene homolog A (ras related)], RALBP1 [ralA binding protein 1], RALGAPA2 [Ral GTPase activating protein, alpha subunit 2 (catalytic)], RALGAPB [Ral GTPase activating protein, beta subunit (non-catalytic)], RALGDS [ral guanine nucleotide dissociation stimulator], RAN [RAN, member RAS oncogene family], RAP1A [RAP1A, member ofRAS oncogene family], RAP1B [RAP B, member of RAS oncogene family], RAP GAP [RAP1 GTPase activating protein], RAPGEF3 [Rap guanine nucleotide exchange factor (GEF) 3], RAPGEF4 [Rap guanine nucleotide exchange factor (GEF) 4], RAPH1 [Ras association (RalGDS/AF-6) and pleckstrin homology domains 1], RAPSN [receptor-associated protein of the synapse], RARA [retinoic acid receptor, alpha], RARB [retinoic acid receptor, beta], RARG [retinoic acid receptor, gamma], RARS [arginyl-tRNA synthetase], RASA1 [RAS p21 protein activator (GTPase activating protein) 1], RASA2 [RAS p21 protein activator 2], RASGRF1 [Ras protein-specific guanine nucleotide-releasing factor 1], RASGRP1 [RAS guanyl releasing protein 1 (calcium and DAG-regulated)], RASSF1 [Ras association (RalGDS/AF-6) domain family member 1], RASSF5 [Ras association (RalGDS/AF-6) domain family member 5], RB1 [retinoblastoma 1], RBBP4 [retinoblastoma binding protein 4], RBM11 [RNA binding motif protein 11], RBM4 [RNA binding motif protein 4], RBM45 [RNA binding motif protein 45], RBP4 [retinol binding protein 4, plasma], RBPJ [recombination signal binding protein for immunoglobulin kappa J region], RCAN [regulator of calcineurin 1], RCAN2 [regulator of calcineurin 2], RCAN3 [ROAN family member 3], RCOR1 [REST corepressor 1], RDX [radixin], REEP3 [receptor accessory protein 3], REG1A [regenerating islet-derived 1 alpha], RELA [v-rel reticuloendotheliosis viral oncogene homolog A (avian)], RELN [reelin], REN [renin], REPIN1 [replication initiator 1], REST [RE1-silencing transcription factor], RET [ret proto-oncogene], RETN [resistin], RFC1 [replication factor C (activator 1) 1, 145 kDa], RFC2 [replication factor C (activator 1) 2, 40 kDa], RFX1 [regulatory factor X, 1 (influences HLA class II expression)], RGMA [RGM domain family, member A], RGMB [RGM domain family, member B], RGS3 [regulator of G-protein signaling 3], RHD [Rh blood group, D antigen], RHEB [Ras homolog enriched in brain], RHO [rhodopsin], RHOA [ras homolog gene family, member A], RHOB [ras homolog gene family, member B], RHOC [ras homolog gene family, member C], RHOD [ras homolog gene family, member D], RHOG [ras homolog gene family, member G (rho G)], RHOH [ras homolog gene family, member H], RICTOR [RPTOR independent companion of MTOR, complex 2], RIMS3 [regulating synaptic membrane exocytosis 3], RIPK1 [receptor (TNFRSF)-interacting serine-threonine kinase 1], RIPK2 [receptor-interacting serine-threonine kinase 2], RNASE1 [ribonuclease, RNase A family, 1 (pancreatic)], RNASE3 [ribonuclease, RNase A family, 3 (eosinophil cationic protein)], RNASEL [ribonuclease L (2′ 5′-oligoisoadenylate synthetase-dependent)], RND1 [Rho family GTPase 1], RND2 [Rho family GTPase 2], RND3 [Rho family GTPase 3], RNF123 [ring finger protein 123], RNF128 [ring finger protein 128], RNF13 [ring finger protein 13], RNF135 [ring finger protein 135], RNF2 [ring finger protein 2], RNF6 [ring finger protein (C3H2C3 type) 6], RNH1 [ribonuclease/angiogenin inhibitor 1], RNPC3 [RNA-binding region (RNP1, RRM) containing 3], ROBO1 [roundabout, axon guidance receptor, homolog 1 (Drosophila)], ROB02 [roundabout, axon guidance receptor, homolog 2 (Drosophila)], ROBO3 [roundabout, axon guidance receptor, homolog 3 (Drosophila)], ROBO4 [roundabout homolog 4, magic roundabout (Drosophila)], ROCK1 [Rho-associated, coiled-coil containing protein kinase 1], ROCK2 [Rho-associated, coiled-coil containing protein kinase 2], RPGR [retinitis pigmentosa GTPase regulator], RPGRIP1 [retinitis pigmentosa GTPase regulator interacting protein 1], RPGRIP1L [RPGRIP1-like], RPL10 [ribosomal protein L10], RPL24 [ribosomal protein L24], RPL5 [ribosomal protein L5], RPL7A [ribosomal protein L7a], RPLP0 [ribosomal protein, large, P0], RPS17 [ribosomal protein S17], RPS17P3 [ribosomal protein S17 pseudogene 3], RPS19 [ribosomal protein S19], RPS27A [ribosomal protein S27a], RPS6 [ribosomal protein S6], RPS6KA1 [ribosomal protein S6 kinase, 90 kDa, polypeptide 1], RPS6KA3 [ribosomal protein S6 kinase, 90 kDa, polypeptide 3], RPS6KA6 [ribosomal protein S6 kinase, 90 kDa, polypeptide 6], RPS6KB1 [ribosomal protein S6 kinase, 70 kDa, polypeptide 1], RRAS [related RAS viral (r-ras) oncogene homolog], RRAS2 [related RAS viral (r-ras) oncogene homolog 2], RRBP1 [ribosome binding protein 1 homolog 180 kDa (dog)], RRM1 [ribonucleotide reductase M1], RRM2 [ribonucleotide reductase M2], RRM2B [ribonucleotide reductase M2 B (TP53 inducible)], RTN4 [reticulon 4], RTN4R [reticulon 4 receptor], RUFY3 [RUN and FYVE domain containing 3], RUNX1 [runt-related transcription factor 1], RUNX1T1 [runt-related transcription factor 1; translocated to, 1 (cyclin D-related)], RUNX2 [runt-related transcription factor 2], RUNX3 [runt-related transcription factor 3], RUVBL2 [RuvB-like 2 (E. coli)], RXRA [retinoid X receptor, alpha], RYK [RYK receptor-like tyrosine kinase], RYR2 [ryanodine receptor 2 (cardiac)], RYR3 [ryanodine receptor 3], S100A1 [S100 calcium binding protein A1], S100A10 [S100 calcium binding protein A10], S100A12 [S100 calcium binding protein A12], S100A2 [S100 calcium binding protein A2], S100A4 [S100 calcium binding protein A4], S100A6 [S100 calcium binding protein A6], S100A7 [S100 calcium binding protein A7], S100A8 [S100 calcium binding protein A8], S100A9 [S100 calcium binding protein A9], S100B [S100 calcium binding protein B], SAA4 [serum amyloid A4, constitutive], SACS [spastic ataxia of Charlevoix-Saguenay (sacsin)], SAFB [scaffold attachment factor B], SAG [S-antigen; retina and pineal gland (arrestin)], SAMHD1 [SAM domain and HD domain 1], SATB2 [SATB homeobox 2], SBDS [Shwachman-Bodian-Diamond syndrome], SCARB1 [scavenger receptor class B, member 1], SCD [stearoyi-CoA desaturase (delta-9-desaturase)], SCD5 [stearoyl-CoA desaturase 5], SCG2 [secretogranin II], SCG5 [secretogranin V (7B2 protein)], SCGB1A1 [secretoglobin, family 1A, member 1 (uteroglobin)], SCN11A [sodium channel, voltage-gated, type XI, alpha subunit], SCN1A [sodium channel, voltage-gated, type 1, alpha subunit], SCN2A [sodium channel, voltage-gated, type II, alpha subunit], SCN3A [sodium channel, voltage-gated, type III, alpha subunit], SCN5A [sodium channel, voltage-gated, type V, alpha subunit], SCN7A [sodium channel, voltage-gated, type VII, alpha], SCNN1B [sodium channel, nonvoltage-gated 1, beta], SCNN1G [sodium channel, nonvoltage-gated 1, gamma], SCP2 [sterol carrier protein 2], SCT [secretin], SCTR [secretin receptor], SCUBE1 [signal peptide, CUB domain, EGF-like 1], SDC2 [syndecan 2], SDC3 [syndecan 3], SDCBP [syndecan binding protein (syntenin)], SDHB [succinate dehydrogenase complex, subunit B, iron sulfur (Ip)], SDHD [succinate dehydrogenase complex, subunit D, integral membrane protein], SDS [serine dehydratase], SEC14L2 [SEC14-like 2 (S. cerevisiae)], SELE [selectin E], SELL [selectin L], SELP [selectin P (granule membrane protein 140 kDa, antigen CD62)], SELPLG [selectin P ligand], SEMA3A [sema domain, immunoglobulin domain (Ig), short basic domain, secreted, (semaphorin) 3A], SEMA3B [sema domain, immunoglobulin domain (Ig), short basic domain, secreted, (semaphorin) 3B], SEMA3C [sema domain, immunoglobulin domain (Ig), short basic domain, secreted, (semaphorin) 30], SEMA3D [sema domain, immunoglobulin domain (Ig), short basic domain, secreted, (semaphorin) 3D], SEMA3E [sema domain, immunoglobulin domain (Ig), short basic domain, secreted, (semaphorin) 3E], SEMA3F [sema domain, immunoglobulin domain (Ig), short basic domain, secreted, (semaphorin) 3F], SEMA3G [sema domain, immunoglobulin domain (Ig), short basic domain, secreted, (semaphorin) 3G], SEMA4A [sema domain, immunoglobulin domain (Ig), transmembrane domain (TM) and short cytoplasmic domain, (semaphorin) 4A], SEMA4B [sema domain, immunoglobulin domain (Ig), transmembrane domain (TM) and short cytoplasmic domain, (semaphorin) 4B], SEMA4C [sema domain, immunoglobulin domain (Ig), transmembrane domain (TM) and short cytoplasmic domain, (semaphorin) 40], SEMA4D [sema domain, immunoglobulin domain (Ig), transmembrane domain (TM) and short cytoplasmic domain, (semaphorin) 4D], SEMA4F [sema domain, immunoglobulin domain (Ig), transmembrane domain (TM) and short cytoplasmic domain, (semaphorin) 4F], SEMA4G [sema domain, immunoglobulin domain (Ig), transmembrane domain (TM) and short cytoplasmic domain, (semaphorin) 4G], SEMA5A [sema domain, seven thrombospondin repeats (type 1 and type 1-like), transmembrane domain (TM) and shmi cytoplasmic domain, (semaphorin) SA], SEMA5B [sema domain, seven thrombospondin repeats (type 1 and type 1-like), transmembrane domain (TM) and short cytoplasmic domain, (semaphorin) 5B], SEMA6A [sema domain, transmembrane domain (TM), and cytoplasmic domain, (semaphorin) 6A], SEMA6B [sema domain, transmembrane domain (TM), and cytoplasmic domain, (semaphorin) 6B], SEMA6C [sema domain, transmembrane domain (TM), and cytoplasmic domain, (semaphorin) 60], SEMA6D [sema domain, transmembrane domain (TM), and cytoplasmic domain, (semaphorin) 6D], SEMA7A [semaphorin 7A, GPI membrane anchor (John Milton Hagen blood group)], SEPP1 [selenoprotein P, plasma, 1], SEPT2 [septin 2], SEPT4 [septin 4], SEPT5 [septin 5], SEPT6 [septin 6], SEPT7 [septin 7], SEPT9 [septin 9], SERPTNA1 [serpin peptidase inhibitor, clade A (alpha-1 antiproteinase, antitrypsin), member 1], SERPINA3 [serpin peptidase inhibitor, clade A (alpha-1 antiproteinase, antitrypsin), member 3], SERPINA7 [serpin peptidase inhibitor, clade A (alpha-1 antiproteinase, antitrypsin), member 7], SERPINB1 [serpin peptidase inhibitor, clade B (ovalbumin), member 1], SERPINB2 [serpin peptidase inhibitor, clade B (ovalbumin), member 2], SERPINB6 [serpin peptidase inhibitor, clade B (ovalbumin), member 6], SERPTNC1 [serpin peptidase inhibitor, clade C (antithrombin), member 1], SERPINE1 [serpin peptidase inhibitor, clade E (nexin, plasminogen activator inhibitor type 1), member 1], SERPINE2 [serpin peptidase inhibitor, clade E (nexin, plasminogen activator inhibitor type 1), member 2], SERPINF1 [serpin peptidase inhibitor, clade F (alpha-2 antiplasmin, pigment epithelium derived factor), member 1], SERPINH1 [serpin peptidase inhibitor, clade H (heat shock protein 47), member 1, (collagen binding protein 1)1, SERPIN11 [serpin peptidase inhibitor, clade I (neuroserpin), member 1], SET [SET nuclear oncogene], SETX [senataxin], SEZ6L2 [seizure related 6 homolog (mouse)-like 2], SFPQ [splicing factor proline/glutamine-rich (polypyrimidinc tract binding protein associated)], SFRP1 [secreted frizzled-related protein 1], SFRP4 [secreted frizzled-related protein 4], SFRS15 [splicing factor, arginine/serine-rich 15], SFTPA [surfactant protein A1], SFTPB [surfactant protein B], SFTPC [surfactant protein C], SGCB [sarcoglycan, beta (43 kDa dystrophin-associated glycoprotein)], SGCE [sarcoglycan, epsilon], SGK1 [serum/glucocorticoid regulated kinase 1], SH2B1 [SH2B adaptor protein 1], SH2B3 [SH2B adaptor protein 3], SH2D1A [SH2 domain containing 1A], SH3BGR [SH3 domain binding glutamic acid-rich protein], SH3BGRL [SH3 domain binding glutamic acid-rich protein like], SH3BP1 [SH3-domain binding protein 1], SH3GL1P2 [SH3-domain GRB2-like 1 pseudogene 2], SH3GL3 [SH3-domain GRB2-like 3], SH3KBP1 [SH3-domain kinase binding protein 1], SH3PXD2A [SH3 and PX domains 2A], SHANK1 [SH3 and multiple ankyrin repeat domains 1], SHANK2 [SH3 and multiple ankyrin repeat domains 2], SHANK3 [SH3 and multiple ankyrin repeat domains 3], SHBG [sex hormone-binding globulin], SHC1 [SHC (Src homology 2 domain containing) transforming protein 1], SHC3 [SHC (Src homology 2 domain containing) transforming protein 3], SHH [sonic hedgehog homolog (Drosophila)], SHOC2 [soc-2 suppressor of clear homolog (C. elegans)], S1 [sucrase-isomaltase (alpha-glucosidase)], SIAH1 [seven in absentia homolog 1 (Drosophila)], SIAH2 [seven in absentia homolog 2 (Drosophila)], SIGMAR1 [sigma non-opioid intracellular receptor 1], SILV [silver homolog (mouse)], SIM1 [single-minded homolog 1 (Drosophila)], SIM2 [single-minded homolog 2 (Drosophila)], SIP1 [survival of motor neuron protein interacting protein 1], SIRPA [signal-regulatory protein alpha], SIRT1 [sirtuin (silent mating type information regulation 2 homolog) 1 (S. cerevisiae)], SIRT4 [sirtuin (silent mating type information regulation 2 homolog) 4 (S. cerevisiae)], SIRT6 [sirtuin (silent mating type information regulation 2 homolog) 6 (S. cerevisiae)], SIX5 [SIX homeobox 5], SKI [v-ski sarcoma viral oncogene homolog (avian)], SKP2 [S-phase kinase-associated protein 2 (p45)], SLAMF6 [SLAM family member 6], SLC10A1 [solute carrier family 10 (sodium/bile acid cotransporter family), member 1], SLC1 A2 [solute carrier family 11 (proton-coupled divalent metal ion transporters), member 2], SLC12A1 [solute carrier family 12 (sodium/potassium/chloride transporters), member 1], SLC12A2 [solute carrier family 12 (sodium/potassium/chloride transporters), member 2], SLC12A3 [solute carrier family 12 (sodium/chloride transporters), member 3], SLC12A5 [solute carrier family 12 (potassium/chloride transporter), member 5], SLC2A6 [solute carrier family 12 (potassium/chloride transporters), member 6], SLC13A1 [solute carrier family 13 (sodium/sulfate symporters), member 1], SLC15A [solute carrier family 15 (oligopeptide transporter), member 1], SLC16A2 [solute carrier family 16, member 2 (monocarboxylic acid transporter 8)], SLC17A5 [solute carrier family 17 (anion/sugar transporter), member 5], SLC17A7 [solute carrier family 17 (sodium-dependent inorganic phosphate cotransporter), member 7], SLC18A2 [solute carrier family 18 (vesicular monoamine), member 2], SLC18A3 [solute carrier family 18 (vesicular acetylcholine), member 3], SLC19A1 [solute carrier family 19 (folate transporter), member 1], SLC19A2 [solute carrier family 19 (thiamine transporter), member 2], SLC1A1 [solute carrier family 1 (neuronal/epithelial high affinity glutamate transporter, system Xag), member 1], SLC1A2 [solute carrier family 1 (glial high affinity glutamate transporter), member 2], SLC1A3 [solute carrier family 1 (glial high affinity glutamate transporter), member 3], SLC22A2 [solute carrier family 22 (organic cation transporter), member 2], SLC25A12 [solute carrier family 25 (mitochondrial carrier, Aralar), member 12], SLC25A13 [solute carrier family 25, member 13 (citrin)], SLC25A20 [solute carrier family 25 (carnitine/acylcarnitine translocase), member 20], SLC25A3 [solute carrier family 25 (mitochondrial carrier; phosphate carrier), member 3], SLC26A3 [solute carrier family 26, member 3], SLC27A1 [solute carrier family 27 (fatty acid transporter), member 1], SLC29A1 [solute carrier family 29 (nucleoside transporters), member 1], SLC2A1 [solute carrier family 2 (facilitated glucose transporter), member 1], SLC2A13 [solute carrier family 2 (facilitated glucose transporter), member 13], SLC2A2 [solute carrier family 2 (facilitated glucose transporter), member 2], SLC2A3 [solute carrier family 2 (facilitated glucose transporter), member 3], SLC2A4 [solute carrier family 2 (facilitated glucose transporter), member 4], SLC30A3 [solute carrier family 30 (zinc transporter), member 3], SLC30A4 [solute carrier family 30 (zinc transporter), member 4], SLC30A8 [solute carrier family 30 (zinc transporter), member 8], SLC31A1 [solute carrier family 31 (copper transporters), member 1], SLC32A1 [solute carrier family 32 (GABA vesicular transporter), member 1], SLC34A1 [solute carrier family 34 (sodium phosphate), member 1], SLC38A3 [solute carrier family 38, member 3], SLC39A2 [solute carrier family 39 (zinc transporter), member 2], SLC39A3 [solute carrier family 39 (zinc transporter), member 3], SLC40A1 [solute carrier family 40 (iron-regulated transporter), member 1], SLC4A11 [solute carrier family 4, sodium borate transpmier, member 11], SLC5A3 [solute carrier family 5 (sodium/myo-inositol cotransporter), member 3], SLC5A8 [solute carrier family 5 (iodide transporter), member 8], SLC6A1 [solute carrier family 6 (neurotransmitter transporter, GABA), member 1], SLC6A14 [solute carrier family 6 (amino acid transporter), member 14], SLC6A2 [solute carrier family 6 (neurotransmitter transporter, noradrenalin), member 2], SLC6A3 [solute carrier family 6 (neurotransmitter transporter, dopamine), member 3], SLC6A4 [solute carrier family 6 (neurotransmitter transporter, serotonin), member 4], SLC6A8 [solute carrier family 6 (neurotransmitter transporter, creatine), member 8], SLC7A14 [solute carrier family 7 (cationic amino acid transporter, y+ system), member 14], SLC7A5 [solute carrier family 7 (cationic amino acid transporter, y+ system), member 5], SLC9A2 [solute carrier family 9 (sodium/hydrogen exchanger), member 2]. SLC9A3 [solute carrier family 9 (sodium/hydrogen exchanger), member 3], SLC9A3R1 [solute carrier family 9 (sodium/hydrogen exchanger), member 3 regulator 1], SLC9A3R2 [solute carrier family 9 (sodium/hydrogen exchanger), member 3 regulator 2], SLC9A6 [solute carrier family 9 (sodium/hydrogen exchanger), member 6], SLIT1 [slit homolog 1 (Drosophila)], SLIT2 [slit homolog 2 (Drosophila)], SLIT3 [slit homolog 3 (Drosophila)], SLITRK1 [SLIT and NTRK-like family, member 1], SLN [sarcolipin], SLPI [secretory leukocyte peptidase inhibitor], SMAD1 [SMAD family member 1], SMAD2 [SMAD family member 2], SMAD3 [SMAD family member 3], SMAD4 [SMAD family member 4], SMAD6 [SMAD family member 6], SMAD7 [SMAD family member 7], SMARCA1 [SWI/SNF related, matrix associated, actin dependent regulator of chromatin, subfamily a, member 1], SMARCA2 [SWI/SNF related, matrix associated, actin dependent regulator of chromatin, subfamily a, member 2], SMARCA4 [SWI/SNF related, matrix associated, actin dependent regulator of chromatin, subfamily a, member 4], SMARCA5 [SWI/SNF related, matrix associated, actin dependent regulator of chromatin, subfamily a, member 5], SMARCB1 [SWI/SNF related, matrix associated, actin dependent regulator of chromatin, subfamily b, member 1], SMARCC1 [SWI/SNF related, matrix associated, actin dependent regulator of chromatin, subfamily c, member 1], SMARCC2 [SWI/SNF related, matrix associated, actin dependent regulator of chromatin, subfamily c, member 2], SMARCD1 [SWI/SNF related, matrix associated, actin dependent regulator of chromatin, subfamily d, member 1], SMARCD3 [SWL/SNF related, matrix associated, actin dependent regulator of chromatin, subfamily d, member 3], SMARCE1 [SWI/SNF related, matrix associated, actin dependent regulator of chromatin, subfamily e, member 1], SMG1 [SMG1 homolog, phosphatidylinositol 3-kinase-related kinase (C. elegans)], SMN1 [survival of motor neuron 1, telomeric], SMO [smoothened homolog (Drosophila)], SMPD1 [sphingomyelin phosphodiesterase 1, acid lysosomal], SMS [spermine synthase], SNA12 [snail homolog 2 (Drosophila)], SNAP25 [synaptosomal-associated protein, 25 kDa], SNCA [synuclein, alpha (non A4 component of amyloid precursor)], SNCAIP [synuclein, alpha interacting protein], SNOB [synuclein, beta], SNCG [synuclein, gamma (breast cancer-specific protein 1)], SNRPA [small nuclear ribonucleoprotein polypeptide A], SNRPN [small nuclear ribonucleoprotein polypeptide N], SNTG2 [syntrophin, gamma 2], SNURF [SNRPN upstream reading frame], SOAT1 [sterol O-acyltransferase 1], SOCS1 [suppressor of cytokine signaling 1], SOCS3 [suppressor of cytokine signaling 3], SOD1 [superoxide dismutase 1, soluble], SOD2 [superoxide dismutase 2, mitochondrial], SORBS3 [sorbin and SH3 domain containing 3], SORL1 [sortilin-related receptor, L(DLR class) A repeats-containing], SORT1 [sortilin 1], SOS1 [son of sevenless homolog 1 (Drosophila)], SOS2 [son of sevenless homolog 2 (Drosophila)], SOSTDC1 [sclerostin domain containing 1], SOX1 [SRY (sex determining region Y)-box 1], SOX10 [SRY (sex determining region Y)-box 10], SOX18 [SRY (sex determining region Y)-box 18], SOX2 [SRY (sex determining region Y)-box 2], SOX3 [SRY (sex determining region Y)-box 3], SOX9 [SRY (sex determining region Y)-box 9], SP1 [Sp1 transcription factor], SP3 [Sp3 transcription factor], SPANXB1 [SPANX family, member B1], SPANXC [SPANX family, member C], SPARC [secreted protein, acidic, cysteine-rich (osteonectin)], SPARCL1 [SPARC-like 1 (hevin)], SPAST [spastin], SPHK [sphingosine kinase 1], SPINK1 [serine peptidase inhibitor, Kazal type 1], SPINT2 [serine peptidase inhibitor, Kunitz type, 2], SPN [sialophorin], SPNS2 [spinster homolog 2 (Drosophila)], SPON2 [spondin 2, extracellular matrix protein], SPP1 [secreted phosphoprotein 1], SPRED2 [sprouty-related, EVH1 domain containing 2], SPRY2 [sprouty homolog 2 (Drosophila)], SPTA1 [spectrin, alpha, erythrocytic 1 (elliptocytosis 2)], SPTAN1 [spectrin, alpha, non-erythrocytic 1 (alpha-fodrin)], SPTB [spectrin, beta, erythrocytic], SPTBN1 [spectrin, beta, non-erythrocytic 1], SRC [v-src sarcoma (Schmidt-Ruppin A-2) viral oncogene homolog (avian)], SRCRB4D [scavenger receptor cysteine rich domain containing, group B (4 domains)], SRD5A1 [steroid-5-alpha-reductase, alpha polypeptide 1 (3-oxo-5 alpha-steroid delta 4-dehydrogenase alpha 1)], SREBF1 [sterol regulatory element binding transcription factor 1], SREBF2 [sterol regulatory element binding transcription factor 2], SRF [serum response factor (c-fos serum response element-binding transcription factor)], SRGAP1 [SLIT-ROBO Rho GTPase activating protein 1], SRGAP2 [SLIT-ROBO Rho GTPase activating protein 2], SRGAP3 [SLIT-ROBO Rho GTPase activating protein 3], SRPX [sushi-repeat-containing protein, X-linked], SRY [sex determining region Y], SSB [Sjogren syndrome antigen B (autoantigen La)], SSH1 [slingshot homolog 1 (Drosophila)], SSRP1 [structure specific recognition protein 1], SST [somatostatin], SSTR1 [somatostatin receptor 1], SSTR2 [somatostatin receptor 2], SSTR3 [somatostatin receptor 3], SSTR4 [somatostatin receptor 4], SSTR5 [somatostatin receptor 5], ST13 [suppression of tumorigenicity 13 (colon carcinoma) (Hsp70 interacting protein)], ST14 [suppression of tumorigenicity 14 (colon carcinoma)], ST6GAL1 [ST6 beta-galactosamide alpha-2 [6-sialyltranferase 1], ST7 [suppression of tumorigenicity 7], STAG2 [stromal antigen 2], STAG3 [stromal antigen 3], STAR [steroidogenic acute regulatory protein], STAT1 [signal transducer and activator of transcription 1, 91 kDa], STAT2 [signal transducer and activator of transcription 2, 113 kDa], STAT3 [signal transducer and activator of transcription 3 (acute-phase response factor)], STAT4 [signal transducer and activator of transcription 4], STAT5A [signal transducer and activator of transcription 5A], STAT5B [signal transducer and activator of transcription 5B], STAT6 [signal transducer and activator of transcription 6, interleukin-4 induced], STATH [statherin], STC1 [stanniocalcin 1], STIL [SCL/TAL1 interrupting locus], STIM1 [stromal interaction molecule 1], STK11 [serine/threonine kinase 11], STK24 [serine/threonine kinase 24 (STE20 homolog, yeast)], STK36 [serine/threonine kinase 36, fused homolog (Drosophila)], STK38 [serine/threonine kinase 38], STK38L [serine/threonine kinase 38 like], STK39 [serine threonine kinase 39 (STE20/SPS1 homolog, yeast)], STMN1 [stathmin 1], STMN2 [stathmin-like 2], STMN3 [stathmin-like 3], STMN4 [stathmin-like 4], STOML1 [stomatin (EPB72)-like 1], STS [steroid sulfatase (microsomal), isozyme S], STUB1 [STIP1 homology and U-box containing protein 1], STX1A [syntaxin 1A (brain)], STX3 [syntaxin 3], STYX [serine/threonine/tyrosine interacting protein], SUFU [suppressor of fused homolog (Drosophila)], SULT2A1 [sulfotransferase family, cytosolic, 2A, dehydroepiandrosterone (DHEA)-preferring, member 1], SUMO [SMT3 suppressor of mif two 3 homolog 1 (S. cerevisiae)], SUMO3 [SMT3 suppressor of mif two 3 homolog 3 (S. cerevisiae)], SUN1 [Sad1 and UNC84 domain containing 1], SUN2 [Sad1 and UNC84 domain containing 2], SUPT16H [suppressor of Ty 16 homolog (S. cerevisiae)], SUZ12P [suppressor of zeste 12 homolog pseudogene], SV2A [synaptic vesicle glycoprotein 2A], SYK [spleen tyrosine kinase], SYN1 [synapsin I], SYN2 [synapsin II], SYN3 [synapsin III], SYNGAP1 [synaptic Ras GTPase activating protein 1 homolog (rat)], SYNJ1 [synaptojanin 1], SYNPO2 [synaptopodin 2], SYP [synaptophysin], SYT1 [synaptotagmin I], TAC1 [tachykinin, precursor 1], TAC3 [tachykinin 3], TACR1 [tachykinin receptor 1], TAF1 [TAF1 RNA polymerase II, TATA box binding protein (TBP)-associated factor, 250 kDa], TAF6 [TAF6 RNA polymerase II, TATA box binding protein (TBP)-associated factor, 80 kDa], TAGAP [T-cell activation RhoGTPase activating protein], TAGLN [transgelin], TAGLN3 [transgelin 3], TAOK2 [TAO kinase 2], TAP1 [transporter 1, ATP-binding cassette, sub-family B (MDR/TAP)], TAP2 [transporter 2, ATP-binding cassette, sub-family B (MDR,TAP)], TAPBP [TAP binding protein (tapasin)], TARDBP [TAR DNA binding protein], TARP [TCR gamma alternate reading frame protein], TAS2R1 [taste receptor, type 2, member 1], TAT [tyrosine aminotransferase], TBC1D4 [TBC1 domain family, member 4], TBCB [tubulin folding cofactor B], TBCD [tubulin folding cofactor D], TBCE [tubulin folding cofactor E], TBL1Y [transducin (beta)-like 1, Y-linked], TBL2 [transducin (beta)-like 2], TBP [TATA box binding protein], TBPL2 [TATA box binding protein like 2], TBR1 [T-box, brain, 1], TBX1 [T-box 1]. TBX21 [T-box 21], TBXA2R [thromboxane A2 receptor], TBXAS1 [thromboxane A synthase 1 (platelet)], TCEB3 [transcription elongation factor B (SIII), polypeptide 3 (110 kDa, elongin A)], TCF12 [transcription factor 12], TCF19 [transcription factor 19], TCF4 [transcription factor 4], TCF7 [transcription factor 7 (T-cell specific, HMG-box)], TCF7L2 [transcription factor 7-like 2 (T-cell specific, HMG-box)], TCHH [trichohyalin], TCN1 [transcobalamin 1 (vitamin B12 binding protein, R binder family)], TCN2 [transcobalamin II; macrocytic anemia], TCP1 [t-complex 1], TD02 [tryptophan 2 [3-dioxygenase], TDRD3 [tudor domain containing 3], TEAD2 [TEA domain family member 2], TEAD4 [TEA domain family member 4], TEK [TEK tyrosine kinase, endothelial], TERF1 [telomeric repeat binding factor (NIMA-interacting) 1], TERF2 [telomeric repeat binding factor 2], TERT [telomerase reverse transcriptase], TET2 [tet oncogene family member 2], TF [transferrin], TFAM [transcription factor A, mitochondrial], TFAP2A [transcription factor AP-2 alpha (activating enhancer binding protein 2 alpha)], TFCP2 [transcription factor CP2], TFF1 [trefoil factor 1], TFF2 [trefoil factor 2], TFF3 [trefoil factor 3 (intestinal)], TFP1 [tissue factor pathway inhibitor (lipoprotein-associated coagulation inhibitor)]. TFPI2 [tissue factor pathway inhibitor 2], TFRC [transferrin receptor (p90, CD71)], TG [thyroglobulin], TGFα [transforming growth factor, alpha], TGFB1 [transforming growth factor, beta 1], TGFB1I1 [transforming growth factor beta 1 induced transcript 1], TGFB2 [transforming growth factor, beta 2], TGFB3 [transforming growth factor, beta 3], TGFBR1 [transforming growth factor, beta receptor 1], TGFBR2 [transforming growth factor, beta receptor II (70/80 kDa)], TGFBR3 [transforming growth factor, beta receptor III], TGIF1 [TGFB-induced factor homeobox 1], TGM2 [transglutaminase 2 (C polypeptide, protein-glutamine-gamma-glutamyltransferase)], TH [tyrosine hydroxylase], THAP1 [THAP domain containing, apoptosis associated protein 1], THBD [thrombomodulin], THBS1 [thrombospondin 1], THBS2 [thrombospondin 2], THBS4 [thrombospondin 4], THEM4 [thioesterase superfamily member 4], THPO [thrombopoietin], THRA [thyroid hormone receptor, alpha (erythroblastic leukemia viral (v-erb-a) oncogene homolog, avian)], THY1 [Thy-1 cell surface antigen], TIAM1 [T-celllymphoma invasion and metastasis 1], TIAM2 [T-cell lymphoma invasion and metastasis 2], TIMP1 [TIMP metallopeptidase inhibitor 1], TIMP2 [TIMP metallopeptidase inhibitor 2], TIMP3 [TIMP metallopeptidase inhibitor 3], TINF2 [TERF1 (TRF1)-interacting nuclear factor 2], TJP1 [tight junction protein 1 (zona occludens 1)], TJP2 [tight junction protein 2 (zona occludens 2)], TK1 [thymidine kinase 1, soluble], TKT [transketolase], TLE1 [transducin-like enhancer of split 1 (E(sp1) homolog, Drosophila)], TLR1 [toll-like receptor 1], TLR2 [toll-like receptor 2], TLR3 [toll-like receptor 3], TLR4 [toll-like receptor 4], TLRS [toll-like receptor 5], TLR7 [toll-like receptor 7], TLR8 [toll-like receptor 8], TLR9 [toll-like receptor 9], TLX3 [T-cell leukemia homeobox 3], TMEFF1 [transmembrane protein with EGF-like and two follistatin-like domains 1], TMEM100 [transmembrane protein 100], TMEM216 [transmembrane protein 216], TMEM50B [transmembrane protein 50B], TMEM67 [transmembrane protein 67], TMEM70 [transmembrane protein 70], TMEM87A [transmembrane protein 87A], TMOD2 [tropomodulin 2 (neuronal)], TMOD4 [tropomodulin 4 (muscle)], TMPRSS11A [transmembrane protease, serine 11A], TMPRSS15 [transmembrane protease, serine 15], TMPRSS2 [transmembrane protease, serine 2], TNC [tenascin C], TNF [tumor necrosis factor (TNF superfamily, member 2)], TNFAIP3 [tumor necrosis factor, alpha-induced protein 3], TNFRSF10A [tumor necrosis factor receptor superfamily, member 10a], TNFRSF10B [tumor necrosis factor receptor superfamily, member 10b], TNFRSF10C [tumor necrosis factor receptor superfamily, member 10c, decoy without an intracellular domain], TNFRSF10D [tumor necrosis factor receptor superfamily, member 10d, decoy with truncated death domain], TNFRSF11B [tumor necrosis factor receptor superfamily, member 1 b], TNFRSF18 [tumor necrosis factor receptor superfamily, member 18], TNFRSF19 [tumor necrosis factor receptor superfamily, member 19], TNFRSF1A [tumor necrosis factor receptor superfamily, member 1A], TNFRSF1B [tumor necrosis factor receptor superfamily, member 1B], TNFRSF25 [tumor necrosis factor receptor superfamily, member 25], TNFRSF8 [tumor necrosis factor receptor superfamily, member 8], TNFSF10 [tumor necrosis factor (ligand) superfamily, member 10], TNFSF11 [tumor necrosis factor (ligand) superfamily, member 11], TNFSF13 [tumor necrosis factor (ligand) superfamily, member 13], TNFSF13B [tumor necrosis factor (ligand) superfamily, member 13b], TNFSF4 [tumor necrosis factor (ligand) superfamily, member 4], TNK2 [tyrosine kinase, non-receptor, 2], TNN13 [troponin I type 3 (cardiac)], TNNT1 [troponin T type 1 (skeletal, slow)], TNNT2 [troponin T type 2 (cardiac)], TNR [tenascin R (restrictin, janusin)], TNS1 [tensin 1], TNS3 [tensin 3], TNXB [tenascin XB], TOLLIP [toll interacting protein], TOP1 [topoisomerase (DNA) I], TOP2A [topoisomerase (DNA) II alpha 170 kDa], TOP2B [topoisomerase (DNA) II beta 180 kDa], TOR1A [torsin family 1, member A (torsin A)], TP53 [tumor protein p53], TP53BP1 [tumor protein p53 binding protein 1], TP63 [tumor protein p63], TP73 [tumor protein p73], TPH1 [tryptophan hydroxylase 1], TPH2 [tryptophan hydroxylase 2], TPI1 [triosephosphate isomerase 1], TPO [thyroid peroxidase], TPT1 [tumor protein, translationally-controlled 1], TPTE [transmembrane phosphatase with tensin homology], TRADD [TNFRSF1A-associated via death domain], TRAF2 [TNF receptor-associated factor 2], TRAF3 [TNF receptor-associated factor 3], TRAF6 [TNF receptor-associated factor 6], TRAP1 [TNF receptor-associated protein 1], TREM1 [triggering receptor expressed on myeloid cells 1], TRH [thyrotropin-releasing hormone], TRIM21 [tripartite motif-containing 21], TRIM22 [tripartite motif-containing 22], TRIM26 [tripartite motif-containing 26], TRIM27 [tripartite motif-containing 27], TRIM50 [tripartite motif-containing 50], TRIO [triple functional domain (PTPRF interacting)], TRPA1 [transient receptor potential cation channel, subfamily A, member 1], TRPC [transient receptor potential cation channel, subfamily C, member 1], TRPC5 [transient receptor potential cation channel, subfamily C, member 5], TRPC6 [transient receptor potential cation channel, subfamily C, member 6], TRPM1 [transient receptor potential cation channel, subfamily M, member 1], TRPV1 [transient receptor potential cation channel, subfamily V, member 1], TRPV2 [transient receptor potential cation channel, subfamily V, member 2], TRRAP [transformation/transcription domain-associated protein], TSC1 [tuberous sclerosis 1], TSC2 [tuberous sclerosis 2], TSC22D3 [TSC22 domain family, member 3], TSG101 [tumor susceptibility gene 101], TSHR [thyroid stimulating hormone receptor], TSN [translin], TSPAN12 [tetraspanin 12], TSPAN7 [tetraspanin 7], TSPO [translocator protein (18 kDa)], TTC3 [tetratricopeptide repeat domain 3], TTF1 [transcription termination factor, RNA polymerase 1], TTF2 [transcription termination factor, RNA polymerase II], TTN [titin], TTPA [tocopherol (alpha) transfer protein], TTR [transthyretin], TUB [tubby homolog (mouse)], TUBA1A [tubulin, alpha 1a], TUBA1B [tubulin, alpha 1b], TUBA1C [tubulin, alpha 1c], TUBA3C [tubulin, alpha 3c], TUBA3D [tubulin, alpha 3d], TUBA4A [tubulin, alpha 4a], TUBA8 [tubulin, alpha 8], TUBB [tubulin, beta], TUBB1 [tubulin, beta 1], TUBB2A [tubulin, beta 2A], TUBB2B [tubulin, beta 2B], TUBB2C [tubulin, beta 20], TUBB3 [tubulin, beta 3], TUBB4 [tubulin, beta 4], TUBB4Q [tubulin, beta polypeptide 4, member Q], TUBB6 [tubulin, beta 6], TUBGCP5 [tubulin, gamma complex associated protein 5], TUFM [Tu translation elongation factor, mitochondrial], TUSC3 [tumor suppressor candidate 3], TWIST1 [twist homolog 1 (Drosophila)], TXN [thioredoxin], TXNIP [thioredoxin interacting protein], TXNRD1 [thioredoxin reductase 1], TXNRD2 [thioredoxin reductase 2], TYK2 [tyrosine kinase 2], TYMP [thymidine phosphorylase], TYMS [thymidylate synthetase], TYR [tyrosinase (oculocutaneous albinism 1A)], TYRO3 [TYRO3 protein tyrosine kinase], TYROBP [TYRO protein tyrosine kinase binding protein], TYRP1 [tyrosinase-related protein 1], U2AF1 [U2 small nuclear RNA auxiliary factor 1], UBA1 [ubiquitin-like modifier activating enzyme 1], UBA52 [ubiquitin A-52 residue ribosomal protein fusion product 1], UBB [ubiquitin B], UBC [ubiquitin C], UBE2A [ubiquitin-conjugating enzyme E2A (RAD6 homolog)], UBE2C [ubiquitin-conjugating enzyme E20], UBE2D2 [ubiquitin-conjugating enzyme E2D 2 (UBC4/5 homolog, yeast)], UBE2H [ubiquitin-conjugating enzyme E2H (UBC8 homolog, yeast)], UBE21 [ubiquitin-conjugating enzyme E2I (UBC9 homolog, yeast)], UBE3A [ubiquitin protein ligase E3A], UBL5 [ubiquitin-like 5], UCHL1 [ubiquitin carboxyl-terminal esterase L1 (ubiquitin thiolesterase)], UCN [urocortin], UCP1 [uncoupling protein 1 (mitochondrial, proton carrier)], UCP2 [uncoupling protein 2 (mitochondrial, proton carrier)], UCP3 [uncoupling protein 3 (mitochondrial, proton carrier)], UGT1A1 [UDP glucuronosyltransferase 1 family, polypeptide A1], UGT1A3 [UDP glucuronosyltransferase 1 family, polypeptide A3], ULK1 [unc-51-like kinase 1 (C. elegans)], UNC5A [unc-5 homolog A (C. elegans)], UNC5B [unc-5 homolog B (C. elegans)], UNC5C [unc-5 homolog C (C. elegans)], UNC5D [unc-5 homolog D (C. elegans)], UNG [uracil-DNA glycosylase], UPF3B [UPF3 regulator of nonsense transcripts homolog B (yeast)], UPK3B [uroplakin 3B], UPP2 [uridine phosphorylase 2], UQCRC1 [ubiquinol-cytochrome c reductase core protein 1], USF1 [upstream transcription factor 1], USF2 [upstream transcription factor 2, c-fos interacting], USH2A [Usher syndrome 2A (autosomal recessive, mild)], USP1 [ubiquitin specific peptidase 1], USP15 [ubiquitin specific peptidase 15], USP25 [ubiquitin specific peptidase 25], USP29 [ubiquitin specific peptidase 29], USP33 [ubiquitin specific peptidase 33], USP4 [ubiquitin specific peptidase 4 (proto-oncogene)], USP5 [ubiquitin specific peptidase 5 (isopeptidase T)], USP9X [ubiquitin specific peptidase 9, X-linked], USP9Y [ubiquitin specific peptidase 9, Y-linked], UTRN [utrophin], UXT [ubiquitously-expressed transcript], VAMP7 [vesicle-associated membrane protein 7], VASP [vasodilator-stimulated phosphoprotein], VAV1 [vav 1 guanine nucleotide exchange factor], VAV2 [vav 2 guanine nucleotide exchange factor], VAX1 [ventral anterior homeobox 1], VCAM1 [vascular cell adhesion molecule 1], VCL [vinculin], VDAC1 [voltage-dependent anion channel 1], VDAC2 [voltage-dependent anion channel2], VDR [vitamin D (1 [25-dihydroxyvitamin D3) receptor], VEGFA [vascular endothelial growth factor A], VEGFB [vascular endothelial growth factor B], VEGFC [vascular endothelial growth factor C], VGF [VGF nerve growth factor inducible], VHL [von Rippel-Lindau tumor suppressor], VIM [vimentin], VIP [vasoactive intestinal peptide], VIPR1 [vasoactive intestinal peptide receptor 1], VIPR2 [vasoactive intestinal peptide receptor 2], VKORC [vitamin K epoxide reductase complex, subunit 1], VLDLR [very low density lipoprotein receptor], VPS29 [vacuolar protein sorting 29 homolog (S. cerevisiae)], VSIG4 [V-set and immunoglobulin domain containing 4], VSX1 [visual system homeobox 1], VTN [vitronectin], VWC2 [von Willebrand factor C domain containing 2], VWF [von Willebrand factor], WAS [Wiskott-Aldrich syndrome (eczema-thrombocytopenia)], WASF1 [WAS protein family, member 1], WASF2 [WAS protein family, member 2], WASL [Wiskott-Aldrich syndrome-like], WBSCR16 [Williams-Beuren syndrome chromosome region 16], WBSCR17 [Williams-Beuren syndrome chromosome region 17], WBSCR22 [Williams Beuren syndrome chromosome region 22], WBSCR27 [Williams Beuren syndrome chromosome region 27], WBSCR28 [Williams-Beuren syndrome chromosome region 28], WDR4 [WD repeat domain 4], WEE1 [WEE1 homolog (S. pombe)], WHAMM [WAS protein homolog associated with actin, golgi membranes and microtubules], WIPF1 [WAS/WASL interacting protein family, member 1], WIPF3 [WAS/WASL interacting protein family, member 3], WNK3 [WNK lysine deficient protein kinase 3], WNT1 [wingless-type MMTV integration site family, member 1], WNT10A [wingless-type MMTV integration site family, member 10A], WNT10B [wingless-type MMTV integration site family, member 10B], WNT11 [wingless-type MMTV integration site family, member 11], WNT16 [wingless-type MMTV integration site family, member 16], WNT2 [wingless-type MMTV integration site family member 2], WNT2B [wingless-type MMTV integration site family, member 2B], WNT3 [wingless-type MMTV integration site family, member 3], WNT3A [wingless-type MMTV integration site family, member 3A], WNT4 [wingless-type MMTV integration site family, member 4], WNT5A [wingless-type MMTV integration site family, member SA], WNTSB [wingless-type MMTV integration site family, member 5B], WNT6 [wingless-type MMTV integration site family, member 6], WNT7A [wingless-type MMTV integration site family, member 7A], WNT7B [wingless-type MMTV integration site family, member 7B], WNT8A [wingless-type MMTV integration site family, member 8A], WNT8B [wingless-type MMTV integration site family, member 8B], WNT9A [wingless-type MMTV integration site family, member 9A], WNT9B [wingless-type MMTV integration site family, member 9B], WRB [tryptophan rich basic protein], WRN [Werner syndrome, RecQ helicase-like], WT1 [Wilms tumor 1], XBP1 [X-box binding protein 1], XCL1 [chemokine (C motif) ligand 1], XDH [xanthine dehydrogenase], XIAP [X-linked inhibitor of apoptosis], XIRP2 [xin actin-binding repeat containing 2], XPC [xeroderma pigmentosum, complementation group C], XRCC1 [X-ray repair complementing defective repair in Chinese hamster cells 1], XRCC5 [X-ray repair complementing defective repair in Chinese hamster cells 5 (double-strand-break rejoining)], XRCC6 [X-ray repair complementing defective repair in Chinese hamster cells 6], XRN1 [5′-3′ exoribonuclease 1], YBX1 [Y box binding protein 1], YWHAB [tyrosine 3-monooxygenase/tryptophan 5-monooxygenase activation protein, beta polypeptide], YWHAE [tyrosine 3-monooxygenase/tryptophan 5-monooxygenase activation protein, epsilon polypeptide], YWHAG [tyrosine 3-monooxygenaseitryptophan 5-monooxygenase activation protein, gamma polypeptide], YWHAQ [tyrosine 3-monooxygenase/tryptophan 5-monooxygenase activation protein, theta polypeptide], YWHAZ [tyrosine 3-monooxygenase/tryptophan 5-monooxygenase activation protein, zeta polypeptide], ZAP70 [zeta-chain (TCR) associated protein kinase 70 kDa], ZBTB16 [zinc finger and BTB domain containing 16], ZBTB33 [zinc finger and BTB domain containing 33], ZC3H12A [zinc finger CCCH-type containing 12A], ZEB1 [zinc finger E-box binding homeobox 1], ZEB2 [zinc finger E-box binding homeobox 2], ZFP161 [zinc finger protein 161 homolog (mouse)], ZFP36 [zinc finger protein 36, C3H type, homolog (mouse)], ZFP42 [zinc finger protein 42 homolog (mouse)], ZFP57 [zinc finger protein 57 homolog (mouse)], ZFPM1 [zinc finger protein, multitype 1], ZFPM2 [zinc finger protein, multitype 2], ZFY [zinc finger protein, Y-linked], ZFYVE9 [zinc finger, FYVE domain containing 9], ZIC1 [Zic family member 1 (odd-paired homolog, Drosophila)], ZIC2 [Zic family member 2 (odd-paired homolog, Drosophila)], ZIC3 [Zic family member 3 (odd-paired homolog, Drosophila)], ZMPSTE24 [zinc metallopeptidase (STE24 homolog. S. cerevisiae)], ZNF148 [zinc finger protein 148], ZNF184 [zinc finger protein 184], ZNF225 [zinc finger protein 225], ZNF256 [zinc finger protein 256], ZNF333 [zinc finger protein 333], ZNF385B [zinc finger protein 385B], ZNF44 [zinc finger protein44], ZNF521 [zinc finger protein 521], ZNF673 [zinc finger family member 673], ZNF79 [zinc finger protein 79], ZNF84 [zinc finger protein 84], ZW10 [ZW10, kinetochore associated, homolog (Drosophila)], and ZYX [zyxin].

[0352] Other inducible systems are contemplated such as, but not limited to, regulation by heavy-metals [Mayo K E et al., Cell 1982, 29:99-108; Searle P F et al., Mol Cell Biol 1985, 5:1480-1489 and Brinster R L et al., Nature (London) 1982, 296:39-42], steroid hormones [Hynes N E et al., Proc Natl Acad Sci USA 1981, 78:2038-2042; Klock G et al., Nature (London) 1987, 329:734-736 and Lee F et al., Nature (London) 1981, 294:228-232.], heat shock [Nouer L: Heat Shock Response. Boca Raton, Fla.: CRC; 1991] and other reagents have been developed [Mullick A, Massie B: Transcription, translation and the control of gene expression. In Encyclopedia of Cell Technology Edited by: Speir R E. Wiley; 2000:1140-1164 and Fussenegger M. Biotechnol Prog 2001, 17:1-51], However, there are limitations with these inducible mammalian promoters such as “leakiness” of the “off” state and pleiotropic effects of inducers (heat shock, heavy metals, glucocorticoids etc.). The use of insect hormones (ecdysone) has been proposed in an attempt to reduce the interference with cellular processes in mammalian cells [No D et al., Proc Natl Acad Sci USA 1996, 93:3346-3351]. Another elegant system uses rapamycin as the inducer [Rivera V M et al., Nat Med 1996, 2:1028-1032] but the role of rapamycin as an immunosuppressant was a major limitation to its use in vivo and therefore it was necessary to find a biologically inert compound [Saez E et al., Proc Natl Acad Sci USA 2000, 97:14512-14517] for the control of gene expression.

[0353] The present invention also encompasses nucleic acid encoding the polypeptides of the present invention. The nucleic acid may comprise a promoter, advantageously human Synapsin 1 promoter (hSyn). In a particularly advantageous embodiment, the nucleic acid may be packaged into an adeno associated viral vector (AAV).

[0354] Also contemplated by the present invention are recombinant vectors and recombinant adenoviruses that may comprise subviral particles from more than one adenovirus serotype. For example, it is known that adenovirus vectors may display an altered tropism for specific tissues or cell types (Havenga, M. J. E, et al., 2002), and therefore, mixing and matching of different adenoviral capsids, i.e., fiber, or penton proteins from various adenoviral serotypes may be advantageous. Modification of the adenoviral capsids, including fiber and penton may result in an adenoviral vector with a tropism that is different from the unmodified adenovirus. Adenovirus vectors that are modified and optimized in their ability to infect target cells may allow for a significant reduction in the therapeutic or prophylactic dose, resulting in reduced local and disseminated toxicity.

[0355] Viral vector gene delivery systems are commonly used in gene transfer and gene therapy applications. Different viral vector systems have their own unique advantages and disadvantages. Viral vectors that may be used to express the pathogen-derived ligand of the present invention include but are not limited to adenoviral vectors, adeno-associated viral vectors, alphavirus vectors, herpes simplex viral vectors, and retroviral vectors, described in more detail below.

[0356] Additional general features of adenoviruses are such that the biology of the adenovirus is characterized in detail; the adenovirus is not associated with severe human pathology; the adenovirus is extremely efficient in introducing its DNA into the host cell; the adenovirus may infect a wide variety of cells and has a broad host range; the adenovirus may be produced in large quantities with relative ease; and the adenovirus may be rendered replication defective and/or non-replicating by deletions in the early region 1 (“E1”) of the viral genome.

[0357] Adenovirus is a non-enveloped DNA virus. The genome of adenovirus is a linear double-stranded DNA molecule of approximately 36,000 base pairs (“bp”) with a 55-kDa terminal protein covalently bound to the 5′-terminus of each strand. The adenovirus DNA contains identical inverted terminal repeats (“ITRs”) of about 100 bp, with the exact length depending on the serotype. The viral origins of replication are located within the ITRs exactly at the genome ends. DNA synthesis occurs in two stages. First, replication proceeds by strand displacement, generating a daughter duplex molecule and a parental displaced strand. The displaced strand is single stranded and may form a “panhandle” intermediate, which allows replication initiation and generation of a daughter duplex molecule. Alternatively, replication may proceed from both ends of the genome simultaneously, obviating the requirement to form the panhandle structure.

[0358] During the productive infection cycle, the viral genes are expressed in two phases: the early phase, which is the period up to viral DNA replication, and the late phase, which coincides with the initiation of viral DNA replication. During the early phase, only the early gene products, encoded by regions E1, E2, E3 and E4, are expressed, which carry out a number of functions that prepare the cell for synthesis of viral structural proteins (Berk, A. J., 1986). During the late phase, the late viral gene products are expressed in addition to the early gene products and host cell DNA and protein synthesis are shut off. Consequently, the cell becomes dedicated to the production of viral DNA and of viral structural proteins (Tooze, J., 1981).

[0359] The E1 region of adenovirus is the first region of adenovirus expressed after infection of the target cell. This region consists of two transcriptional units, the E1A and E1B genes, both of which are required for oncogenic transformation of primary (embryonal) rodent cultures. The main functions of the E1A gene products are to induce quiescent cells to enter the cell cycle and resume cellular DNA synthesis, and to transcriptionally activate the E1B gene and the other early regions (E2, E3 and E4) of the viral genome. Transfection of primary cells with the E1A gene alone may induce unlimited proliferation (immortalization), but does not result in complete transformation. However, expression of E1A, in most cases, results in induction of programmed cell death (apoptosis), and only occasionally is immortalization obtained (Jochemsen et al., 1987). Co-expression of the E1B gene is required to prevent induction of apoptosis and for complete morphological transformation to occur. In established immortal cell lines, high-level expression of E1A may cause complete transformation in the absence of E1B (Roberts. B. E, et al., 1985).

[0360] The E1B encoded proteins assist E1A in redirecting the cellular functions to allow viral replication. The E1B 55 kD and E4 33 kD proteins, which form a complex that is essentially localized in the nucleus, function in inhibiting the synthesis of host proteins and in facilitating the expression of viral genes. Their main influence is to establish selective transport of viral mRNAs from the nucleus to the cytoplasm, concomitantly with the onset of the late phase of infection. The E1B 21 kD protein is important for correct temporal control of the productive infection cycle, thereby preventing premature death of the host cell before the virus life cycle has been completed. Mutant viruses incapable of expressing the E1B 21 kD gene product exhibit a shortened infection cycle that is accompanied by excessive degradation of host cell chromosomal DNA (deg-phenotype) and in an enhanced cytopathic effect (cyt-phenotype; Telling et al., 1994). The deg and cyt phenotypes are suppressed when in addition the E1A gene is mutated, indicating that these phenotypes are a function of E1A (White, E, et al., 1988). Furthermore, the E1B21 kDa protein slows down the rate by which E1A switches on the other viral genes. It is not yet known by which mechanisms E1B21 kD quenches these E1A dependent functions.

[0361] In contrast to, for example, retroviruses, adenoviruses do not efficiently integrate into the host cell's genome, are able to infect non-dividing cells, and are able to efficiently transfer recombinant genes in vivo (Brody et al., 1994). These features make adenoviruses attractive candidates for in vivo gene transfer of, for example, an antigen or immunogen of interest into cells, tissues or subjects in need thereof.

[0362] Adenovirus vectors containing multiple deletions are preferred to both increase the carrying capacity of the vector and reduce the likelihood of recombination to generate replication competent adenovirus (RCA). Where the adenovirus contains multiple deletions, it is not necessary that each of the deletions, if present alone, would result in a replication defective and/or non-replicating adenovirus. As long as one of the deletions renders the adenovirus replication defective or non-replicating, the additional deletions may be included for other purposes, e.g., to increase the carrying capacity of the adenovirus genome for heterologous nucleotide sequences. Preferably, more than one of the deletions prevents the expression of a functional protein and renders the adenovirus replication defective and/or non-replicating and/or attenuated. More preferably, all of the deletions are deletions that would render the adenovirus replication-defective and/or non-replicating and/or attenuated. However, the invention also encompasses adenovirus and adenovirus vectors that are replication competent and/or wild-type, i.e. comprises all of the adenoviral genes necessary for infection and replication in a subject.

[0363] Embodiments of the invention employing adenovirus recombinants may include E1-defective or deleted, or E3-defective or deleted, or E4-defective or deleted or adenovirus vectors comprising deletions of E1 and E3, or E1 and E4, or E3 and E4, or E1, E3, and E4 deleted, or the “gutless” adenovirus vector in which all viral genes are deleted. The adenovirus vectors may comprise mutations in E1, E3, or E4 genes, or deletions in these or all adenoviral genes. The E1 mutation raises the safety margin of the vector because E1-defective adenovirus mutants are said to be replication-defective and/or non-replicating in non-permissive cells, and are, at the very least, highly attenuated. The E3 mutation enhances the immunogenicity of the antigen by disrupting the mechanism whereby adenovirus down-regulates MHC class I molecules. The E4 mutation reduces the immunogenicity of the adenovirus vector by suppressing the late gene expression, thus may allow repeated re-vaccination utilizing the same vector. The present invention comprehends adenovirus vectors of any serotype or serogroup that are deleted or mutated in E1, or E3, or E4, or E1 and E3, or E1 and E4. Deletion or mutation of these adenoviral genes result in impaired or substantially complete loss of activity of these proteins.

[0364] The “gutless” adenovirus vector is another type of vector in the adenovirus vector family. Its replication requires a helper virus and a special human 293 cell line expressing both E1a and Cre, a condition that does not exist in a natural environment; the vector is deprived of all viral genes, thus the vector as a vaccine carrier is non-immunogenic and may be inoculated multiple times for re-vaccination. The “gutless” adenovirus vector also contains 36 kb space for accommodating antigen or immunogen(s) of interest, thus allowing co-delivery of a large number of antigen or immunogens into cells.

[0365] Adeno-associated virus (AAV) is a single-stranded DNA parvovirus which is endogenous to the human population. Although capable of productive infection in cells from a variety of species, AAV is a dependovirus, requiring helper functions from either adenovirus or herpes virus for its own replication. In the absence of helper functions from either of these helper viruses, AAV will infect cells, uncoat in the nucleus, and integrate its genome into the host chromosome, but will not replicate or produce new viral particles.

[0366] The genome of AAV has been cloned into bacterial plasmids and is well characterized. The viral genome consists of 4682 bases which include two terminal repeats of 145 bases each. These terminal repeats serve as origins of DNA replication for the virus. Some investigators have also proposed that they have enhancer functions. The rest of the genome is divided into two functional domains. The left portion of the genome codes for the rep functions which regulate viral DNA replication and vital gene expression. The right side of the vital genome contains the cap genes that encode the structural capsid proteins VP1, VP2 and VP3. The proteins encoded by both the rep and cap genes function in trans during productive AAV replication.

[0367] AAV is considered an ideal candidate for use as a transducing vector, and it has been used in this manner. Such AAV transducing vectors comprise sufficient cis-acting functions to replicate in the presence of adenovirus or herpes virus helper functions provided in trans. Recombinant AAV (rAAV) have been constructed in a number of laboratories and have been used to carry exogenous genes into cells of a variety of lineages. In these vectors, the AAV cap and/or rep genes are deleted from the viral genome and replaced with a DNA segment of choice. Current vectors may accommodate up to 4300 bases of inserted DNA.

[0368] To produce rAAV, plasmids containing the desired vital construct are transfected into adenovirus-infected cells. In addition, a second helper plasmid is cotransfected into these cells to provide the AAV rep and cap genes which are obligatory for replication and packaging of the recombinant viral construct. Under these conditions, the rep and cap proteins of AAV act in trans to stimulate replication and packaging of the rAAV construct. Three days after transfection, rAAV is harvested from the cells along with adenovirus. The contaminating adenovirus is then inactivated by heat treatment.

[0369] Herpes Simplex Virus 1 (HSV-1) is an enveloped, double-stranded DNA virus with a genome of 153 kb encoding more than 80 genes. Its wide host range is due to the binding of viral envelope glycoproteins to the extracellular heparin sulphate molecules found in cell membranes (WuDunn & Spear, 1989). Internalization of the virus then requires envelope glycoprotein gD and fibroblast growth factor receptor (Kaner, 1990). HSV is able to infect cells lytically or may establish latency. HSV vectors have been used to infect a wide variety of cell types (Lowenstein, 1994; Huard, 1995; Miyanohara, 1992; Liu, 1996; Goya, 1998).

[0370] There are two types of HSV vectors, called the recombinant HSV vectors and the amplicon vectors. Recombinant HSV vectors are generated by the insertion of transcription units directly into the HSV genome, through homologous recombination events. The amplicon vectors are based on plasmids bearing the transcription unit of choice, an origin of replication, and a packaging signal.

[0371] HSV vectors have the obvious advantages of a large capacity for insertion of foreign genes, the capacity to establish latency in neurons, a wide host range, and the ability to confer transgene expression to the CNS for up to 18 months (Carpenter & Stevens, 1996).

[0372] Retroviruses are enveloped single-stranded RNA viruses, which have been widely used in gene transfer protocols. Retroviruses have a diploid genome of about 7-10 kb, composed of four gene regions termed gag, pro, pol and env. These gene regions encode for structural capsid proteins, viral protease, integrase and viral reverse transcriptase, and envelope glycoproteins, respectively. The genome also has a packaging signal and cis-acting sequences, termed long-terminal repeats (LTRs), at each end, which have a role in transcriptional control and integration.

[0373] The most commonly used retroviral vectors are based on the Moloney murine leukaemia virus (Mo-MLV) and have varying cellular tropisms, depending on the receptor binding surface domain of the envelope glycoprotein.

[0374] Recombinant retroviral vectors are deleted from all retroviral genes, which are replaced with marker or therapeutic genes, or both. To propagate recombinant retroviruses, it is necessary to provide the viral genes, gag, pol and env in trans.

[0375] Lentiviruses are complex retroviruses that have the ability to infect and express their genes in both mitotic and post-mitotic cells. The most commonly known lentivirus is the human immunodeficiency virus (HIV), which uses the envelope glycoproteins of other viruses to target a broad range of cell types.

[0376] Alphaviruses, including the prototype Sindbis virus (SIN), Semliki Forest virus (SFV), and Venezuelan equine encephalitis virus (VEE), constitute a group of enveloped viruses containing plus-stranded RNA genomes within icosahedral capsids.

[0377] The viral vectors of the present invention are useful for the delivery of nucleic acids expressing antigens or immunogens to cells both in vitro and in vivo. In particular, the inventive vectors may be advantageously employed to deliver or transfer nucleic acids to cells, more preferably mammalian cells. Nucleic acids of interest include nucleic acids encoding peptides and proteins, preferably therapeutic (e.g., for medical or veterinary uses) or immunogenic (e.g., for vaccines) peptides or proteins.

[0378] Preferably, the codons encoding the antigen or immunogen of interest are “optimized” codons, i.e., the codons are those that appear frequently in, e.g.., highly expressed genes in the subject's species, instead of those codons that are frequently used by, for example, an influenza virus. Such codon usage provides for efficient expression of the antigen or immunogen in animal cells. In other embodiments, for example, when the antigen or immunogen of interest is expressed in bacteria, yeast or another expression system, the codon usage pattern is altered to represent the codon bias for highly expressed genes in the organism in which the antigen or immunogen is being expressed. Codon usage patterns are known in the literature for highly expressed genes of many species (e.g., Nakamura et al., 1996; Wang et al., 1998; McEwan et al. 1998).

[0379] As a further alternative, the viral vectors may be used to infect a cell in culture to express a desired gene product, e.g., to produce a protein or peptide of interest. Preferably, the protein or peptide is secreted into the medium and may be purified therefrom using routine techniques known in the art. Signal peptide sequences that direct extracellular secretion of proteins are known in the art and nucleotide sequences encoding the same may be operably linked to the nucleotide sequence encoding the peptide or protein of interest by routine techniques known in the art. Alternatively, the cells may be lysed and the expressed recombinant protein may be purified from the cell lysate. Preferably, the cell is an animal cell, more preferably a mammalian cell. Also preferred are cells that are competent for transduction by particular viral vectors of interest. Such cells include PER.C6 cells, 911 cells, and HEK293 cells.

[0380] A culture medium for culturing host cells includes a medium commonly used for tissue culture, such as M199-earle base, Eagle MEM (E-MEM), Dulbecco MEM (DMEM), SC-UCM102, UP-SFM (GIBCO BRL), EX-CELL302 (Nichirei), EX-CELL293-S(Nichirei), TFBM-01 (Nichirei), ASF104, among others. Suitable culture media for specific cell types may be found at the American Type Culture Collection (ATCC) or the European Collection of Cell Cultures (ECACC). Culture media may be supplemented with amino acids such as L-glutamine, salts, anti-fungal or anti-bacterial agents such as Fungizone4, penicillin-streptomycin, animal serum, and the like. The cell culture medium may optionally be serum-free.

[0381] The present invention also relates to cell lines or transgenic animals which are capable of expressing or overexpressing LITEs or at least one agent useful in the present invention. Preferably the cell line or animal expresses or overexpresses one or more LITEs.

[0382] The transgenic animal is typically a vertebrate, more preferably a rodent, such as a rat or a mouse, but also includes other mammals such as human, goat, pig or cow etc.

[0383] Such transgenic animals are useful as animal models of disease and in screening assays for new useful compounds. By specifically expressing one or more polypeptides, as defined above, the effect of such polypeptides on the development of disease may be studied. Furthermore, therapies including gene therapy and various drugs may be tested on transgenic animals. Methods for the production of transgenic animals are known in the art. For example, there are several possible routes for the introduction of genes into embryos. These include (i) direct transfection or retroviral infection of embryonic stem cells followed by introduction of these cells into an embryo at the blastocyst stage of development; (ii) retroviral infection of early embryos; and (iii) direct microinjection of DNA into zygotes or early embryo cells. The gene and/or transgene may also include genetic regulatory elements and/or structural elements known in the art. A type of target cell for transgene introduction is the embryonic stem cell (ES). ES cells may be obtained from pre-implantation embryos cultured in vitro and fused with embryos (Evans et al., 1981, Nature 292:154-156; Bradley et al., 1984, Nature 309:255-258; Gossler et al., 1986, Proc. Natl. Acad. Sci. USA 83:9065-9069; and Robertson et al., 1986Nature 322:445-448). Transgenes may be efficiently introduced into the ES cells by a variety of standard techniques such as DNA transfection, microinjection, or by retrovirus-mediated transduction. The resultant transformed ES cells may thereafter be combined with blastocysts from a non-human animal. The introduced ES cells thereafter colonize the embryo and contribute to the germ line of the resulting chimeric animal (Jaenisch, 1988, Science 240: 1468-1474).

[0384] LITEs may also offer valuable temporal precision in vivo. LITEs may be used to alter gene expression during a particular stage of development, for example, by repressing a particular apoptosis gene only during a particular stage of C. elegans growth. LITEs may be used to time a genetic cue to a particular experimental window. For example, genes implicated in learning may be overexpressed or repressed only during the learning stimulus in a precise region of the intact rodent or primate brain. Further, LITEs may be used to induce gene expression changes only during particular stages of disease development. For example, an oncogene may be overexpressed only once a tumor reaches a particular size or metastatic stage. Conversely, proteins suspected in the development of Alzheimer's may be knocked down only at defined time points in the animal's life and within a particular brain region. Although these examples do not exhaustively list the potential applications of the LITE system, they highlight some of the areas in which LITEs may be a powerful technology.

[0385] Therapeutic or diagnostic compositions of the invention are administered to an individual in amounts sufficient to treat or diagnose disorders. The effective amount may vary according to a variety of factors such as the individual's condition, weight, sex and age. Other factors include the mode of administration.

[0386] The pharmaceutical compositions may be provided to the individual by a variety of routes such as subcutaneous, topical, oral and intramuscular.

[0387] Compounds identified according to the methods disclosed herein may be used alone at appropriate dosages. Alternatively, co-administration or sequential administration of other agents may be desirable.

[0388] The present invention also has the objective of providing suitable topical, oral, systemic and parenteral pharmaceutical formulations for use in the novel methods of treatment of the present invention. The compositions containing compounds identified according to this invention as the active ingredient may be administered in a wide variety of therapeutic dosage forms in conventional vehicles for administration. For example, the compounds may be administered in such oral dosage forms as tablets, capsules (each including timed release and sustained release formulations), pills, powders, granules, elixirs, tinctures, solutions, suspensions, syrups and emulsions, or by injection. Likewise, they may also be administered in intravenous (both bolus and infusion), intraperitoneal, subcutaneous, topical with or without occlusion, or intramuscular form, all using forms well known to those of ordinary skill in the pharmaceutical arts.

[0389] Advantageously, compounds of the present invention may be administered in a single daily dose, or the total daily dosage may be administered in divided doses of two, three or four times daily. Furthermore, compounds for the present invention may be administered in intranasal form via topical use of suitable intranasal vehicles, or via transdermal routes, using those forms of transdermal skin patches well known to those of ordinary skill in that art. To be administered in the form of a transdermal delivery system, the dosage administration will, of course, be continuous rather than intermittent throughout the dosage regimen.

[0390] For combination treatment with more than one active agent, where the active agents are in separate dosage formulations, the active agents may be administered concurrently, or they each may be administered at separately staggered times.

[0391] The dosage regimen utilizing the compounds of the present invention is selected in accordance with a variety of factors including type, species, age, weight, sex and medical condition of the patient; the severity of the condition to be treated; the route of administration; the renal, hepatic and cardiovascular function of the one patient; and the particular compound thereof employed. A physician of ordinary skill may readily determine and prescribe the effective amount of the drug required to prevent, counter or arrest the progress of the condition. Optimal precision in achieving concentrations of drug within the range that yields efficacy without toxicity requires a regimen based on the kinetics of the drug's availability to target sites. This involves a consideration of the distribution, equilibrium, and elimination of a drug.

[0392] Although the present invention and its advantages have been described in detail, it should be understood that various changes, substitutions and alterations may be made herein without departing from the spirit and scope of the invention as defined in the appended claims.

[0393] The present invention will be further illustrated in the following Examples which are given for illustration purposes only and are not intended to limit the invention in any way.

### EXAMPLES

### Example 1

[0394] The ability to directly modulate gene expression from the endogenous mammalian genome is critical for elucidating normal gene function and disease mechanism. Advances that further refine the spatial and temporal control of gene expression within cell populations have the potential to expand the utility of gene modulation. Applicants previously developed transcription activator-like effectors (TALEs) from Xanthamonas oryze to enable the rapid design and construction of site-specific DNA binding proteins. Applicants developed a set of molecular tools for enabling light-regulated gene expression in the endogenous mammalian genome. The system consists of engineered artificial transcription factors linked to light-sensitive dimerizing protein domains from Arabidopsis thaliana. The system responds to light in the range of 450 nm-500 nm and is capable of inducing a significant increase in the expression of pluripotency factors after stimulation with light at an intensity of 6.2 mW/cm² in mammalian cells. Applicants are developing tools for the targeting of a wide range of genes. Applicants believe that a toolbox for the light-mediated control of gene expression would complement the existing optogenetic methods and may in the future help elucidate the timing-, cell type- and concentrationdependent role of specific genes in the brain.

[0395] The ability to directly modulate gene expression from the endogenous mammalian genome is critical for elucidating normal gene function and disease mechanisms. Applicants present the development of a set of molecular tools for enabling light-regulated gene expression in the endogenous mammalian genome. This system consists of a transcription activator like effector (TALE) and the activation domain VP64 linked to the light-sensitive dimerizing protein domains cryptochrome 2 (CRY2) and C1B1 from Arabidopsis thaliana. Applicants show that blue-light stimulation of HEK293FT and Neuro-2a cells transfected with these LITE constructs designed to target the promoter region of KLF4 and Neurog2 results in a significant increase in target expression, demonstrating the functionality of TALE-based optical gene expression modulation technology.

[0396] FIG. 1 shows a schematic depicting the need for spatial and temporal precision.

[0397] FIG. 2 shows transcription activator like effectors (TALEs). TALEs consist of 34 aa repeats at the core of their sequence. Each repeat corresponds to a base in the target DNA that is bound by the TALE. Repeats differ only by 2 variable amino acids at positions 12 and 13. The code of this correspondence has been elucidated (Boch, J et al., Science, 2009 and Moscou, M et al., Science, 2009) and is shown in this figure. Applicants developed a method for the synthesis of designer TALEs incorporating this code and capable of binding a sequence of choice within the genome (Zhang, F et al., Nature Biotechnology, 2011).

[0398] FIG. 3 depicts a design of a LITE: TALE/Cryptochrome transcriptional activation. Each LITE is a two-component system which may comprise a TALE fused to CRY2 and the cryptochrome binding partner CIB1 fused to VP64, a transcription activor. In the inactive state, the TALE localizes its fused CRY2 domain to the promoter region of the gene of interest. At this point, CIB1 is unable to bind CRY2, leaving the CIB1-VP64 unbound in the nuclear space. Upon stimulation with 488 nm (blue) light, CRY2 undergoes a conformational change, revealing its CIB1 binding site (Liu, H et al., Science, 2008). Rapid binding of CIB1 results in recruitment of the fused VP64 domain, which induces transcription of the target gene.

[0399] FIG. 4 depicts effects of cryptochrome dimer truncations on LITE activity. Truncations known to alter the activity of CRY2 and CIB1 ( ) were compared against the full length proteins. A LITE targeted to the promoter of Neurog2 was tested in Neuro-2a cells for each combination of domains. Following stimulation with 488 nm light, transcript levels of Neurog2 were quantified using qPCR for stimulated and unstimulated samples.

[0400] FIG. 5 depicts a light-intensity dependent response of KLF4 LITE.

[0401] FIG. 6 depicts activation kinetics of Neurog2 LITE and inactivation kinetics of Neurog2 LITE.

### Example 2

[0402] Normal gene expression is a dynamic process with carefully orchestrated temporal and spatial components, the precision of which are necessary for normal development, homeostasis, and advancement of the organism. In turn, the dysregulation of required gene expression patterns, either by increased, decreased, or altered function of a gene or set of genes, has been linked to a wide array of pathologies. Technologies capable of modulating gene expression in a spatiotemporally precise fashion will enable the elucidation of the genetic cues responsible for normal biological processes and disease mechanisms. To address this technological need, Applicants developed light-inducible transcriptional effectors (LITEs), which provide light-mediated control of endogenous gene expression.

[0403] Inducible gene expression systems have typically been designed to allow for chemically inducible activation of an inserted open reading frame or shRNA sequence, resulting in gene overexpression or repression, respectively. Disadvantages of using open reading frames for overexpression include loss of splice variation and limitation of gene size. Gene repression via RNA interference, despite its transformative power in human biology, may be hindered by complicated off-target effects. Certain inducible systems including estrogen, ecdysone, and FKBP12/FRAP based systems are known to activate off-target endogenous genes. The potentially deleterious effects of long-term antibiotic treatment may complicate the use of tetracycline transactivator (TET) based systems. In vivo, the temporal precision of these chemically inducible systems is dependent upon the kinetics of inducing agent uptake and elimination. Further, because inducing agents are generally delivered systemically, the spatial precision of such systems is bounded by the precision of exogenous vector delivery.

[0404] In response to these limitations, LITEs are designed to modulate expression of individual endogenous genes in a temporally and spatially precise manner. Each LITE is a two component system consisting of a customized DNA-binding transcription activator like effector (TALE) protein, a light-responsive crytochrome heterodimer from Arabadopsis thaliana, and a transcriptional activation/repression domain. The TALE is designed to bind to the promoter sequence of the gene of interest. The TALE protein is fused to one half of the cryptochrome heterodimer (cryptochrome-2 or CIB1), while the remaining cryptochrome partner is fused to a transcriptional effector domain. Effector domains may be either activators, such as VP16, VP64, or p65, or repressors, such as KRAB, EnR, or SID. In a LITE's unstimulated state, the TALE-cryptochrome2 protein localizes to the promoter of the gene of interest, but is not bound to the CIB1-effector protein. Upon stimulation of a LITE with blue spectrum light, cryptochrome-2 becomes activated, undergoes a conformational change, and reveals its binding domain. CIB1, in turn, binds to cryptochrome-2 resulting in localization of the effector domain to the promoter region of the gene of interest and initiating gene overexpression or silencing.

[0405] Gene targeting in a LITE is achieved via the specificity of customized TALE DNA binding proteins. A target sequence in the promoter region of the gene of interest is selected and a TALE customized to this sequence is designed. The central portion of the TALE consists of tandem repeats 34 amino acids in length. Although the sequences of these repeats are nearly identical, the 12th and 13th amino acids (termed repeat variable diresidues) of each repeat vary, determining the nucleotide-binding specificity of each repeat. Thus, by synthesizing a construct with the appropriate ordering of TALE monomer repeats, a DNA binding protein specific to the target promoter sequence is created.

[0406] Light responsiveness of a LITE is achieved via the activation and binding of cryptochrome-2 and CIB1. As mentioned above, blue light stimulation induces an activating conformational change in cryptochrome-2, resulting in recruitment of its binding partner CIB1. This binding is fast and reversible, achieving saturation in <15 sec following pulsed stimulation and returning to baseline <15 min after the end of stimulation. These rapid binding kinetics result in a LITE system temporally bound only by the speed of transcription/translation and transcript/protein degradation, rather than uptake and clearance of inducing agents. Crytochrome-2 activation is also highly sensitive, allowing for the use of low light intensity stimulation and mitigating the risks of phototoxicity. Further, in a context such as the intact mammalian brain, variable light intensity may be used to control the size of a LITE stimulated region, allowing for greater precision than vector delivery alone may offer.

[0407] The modularity of the LITE system allows for any number of effector domains to be employed for transcriptional modulation. Thus, activator and repressor domains may be selected on the basis of species, strength, mechanism, duration, size, or any number of other parameters.

[0408] Applicants next present two prototypical manifestations of the LITE system. The first example is a LITE designed to activate transcription of the mouse gene NEUROG2. The sequence TGAATGATGATAATACGA (SEQ ID NO: 27), located in the upstream promoter region of mouse NEUROG2, was selected as the target and a TALE was designed and synthesized to match this sequence. The TALE sequence was linked to the sequence for cryptochrome-2 via a nuclear localization signal (amino acids: SPKKKRKVEAS (SEQ ID NO: 28)) to facilitate transport of the protein from the cytosol to the nuclear space. A second vector was synthesized comprising the CIB1 domain linked to the transcriptional activator domain VP64 using the same nuclear localization signal. This second vector, also a GFP sequence, is separated from the CIB1-VP64 fusion sequence by a 2A translational skip signal. Expression of each construct was driven by a ubiquitous, constitutive promoter (CMV or EF1-α). Mouse neuroblastoma cells from the Neuro 2A cell line were co-transfected with the two vectors. After incubation to allow for vector expression, samples were stimulated by periodic pulsed blue light from an array of 488 nm LEDs. Unstimulated co-tranfected samples and samples transfected only with the fluorescent reporter YFP were used as controls. At the end of each experiment, mRNA was purified from the samples analyzed via qPCR.

[0409] Truncated versions of cryptochrome-2 and CIB1 were cloned and tested in combination with the full-length versions of cryptochrome-2 and CIB1 in order to determine the effectiveness of each heterodimer pair. The combination of the CRY2PHR domain, consisting of the conserved photoresponsive region of the cryptochrome-2 protein, and the full-length version of CIB1 resulted in the highest upregulation of Neurog2 mRNA levels (˜22 fold over YFP samples and ˜7 fold over unstimulated co-transfected samples). The combination of full-length cryptochrome-2 (CRY2) with full-length CIB1 resulted in a lower absolute activation level (˜4.6 fold over YFP), but also a lower baseline activation (˜1.6 fold over YFP for unstimulated co-transfected samples). These cryptochrome protein pairings may be selected for particular uses depending on absolute level of induction required and the necessity to minimize baseline “leakiness” of the LITE system.

[0410] Speed of activation and reversibility are critical design parameters for the LITE system. To characterize the kinetics of the LITE system, constructs consisting of the Neurog2 TALE-CRY2PHR and CIB1-VP64 version of the system were tested to determine its activation and inactivation speed. Samples were stimulated for as little as 0.5 h to as long as 24 h before extraction. Upregulation of Neurog2 expression was observed at the shortest, 0.5 h, time point (˜5 fold vs YFP samples). Neurog2 expression peaked at 12 h of stimulation (˜19 fold vs YFP samples). Inactivation kinetics were analyzed by stimulating co-transfected samples for 6 h, at which time stimulation was stopped, and samples were kept in culture for 0 to 12 h to allow for mRNA degradation. Neurog2 mRNA levels peaked at 0.5 h after the end of stimulation (˜16 fold vs. YFP samples), after which the levels degraded with an ˜3 h half-life before returning to near baseline levels by 12 h.

[0411] The second prototypical example is a LITE designed to activate transcription of the human gene KLF4. The sequence TTCTTACTTATAAC (SEQ ID NO: 29), located in the upstream promoter region of human KLF4, was selected as the target and a TALE was designed and synthesized to match this sequence. The TALE sequence was linked to the sequence for CRY2PHR via a nuclear localization signal (amino acids: SPKKKRKVEAS (SEQ ID NO: 28)). The identical CIB1-VP64 activator protein described above was also used in this manifestation of the LITE system. Human embryonal kidney cells from the HEK293FT cell line were co-transfected with the two vectors. After incubation to allow for vector expression, samples were stimulated by periodic pulsed blue light from an array of 488 nm LEDs. Unstimulated co-tranfected samples and samples transfected only with the fluorescent reporter YFP were used as controls. At the end of each experiment, mRNA was purified from the samples analyzed via qPCR.

[0412] The light-intensity response of the LITE system was tested by stimulating samples with increased light power (0-9 mW/cm²). Upregulation of KLF4 mRNA levels was observed for stimulation as low as 0.2 mW/cm². KLF4 upregulation became saturated at 5 mW/cm² (2.3 fold vs. YFP samples). Cell viability tests were also performed for powers up to 9 mW/cm² and showed >98% cell viability. Similarly, the KLF4 LITE response to varying duty cycles of stimulation was tested (1.6-100%). No difference in KLF4 activation was observed between different duty cycles indicating that a stimulation paradigm of as low as 0.25 sec every 15 sec should result in maximal activation.

[0413] There are potential applications for which LITEs represent an advantageous choice for gene expression control. There exist a number of in vitro applications for which LITEs are particularly attractive. In all these cases, LITEs have the advantage of inducing endogenous gene expression with the potential for correct splice variant expression.

[0414] Because LITE activation is photoinducible, spatially defined light patterns, created via masking or rasterized laser scanning, may be used to alter expression levels in a confined subset of cells. For example, by overexpressing or silencing an intercellular signaling molecule only in a spatially constrained set of cells, the response of nearby cells relative to their distance from the stimulation site may help elucidate the spatial characteristics of cell non-autonomous processes. Additionally, recent advances in cell reprogramming biology have shown that overexpression of sets of transcription factors may be utilized to transform one cell type, such as fibroblasts, into another cell type, such as neurons or cardiomyocytes. Further, the correct spatial distribution of cell types within tissues is critical for proper organotypic function. Overexpression of reprogramming factors using LITEs may be employed to reprogram multiple cell lineages in a spatially precise manner for tissue engineering applications.

[0415] The rapid transcriptional response and endogenous targeting of LITEs make for an ideal system for the study of transcriptional dynamics. For example, LITEs may be used to study the dynamics of mRNA splice variant production upon induced expression of a target gene. On the other end of the transcription cycle, mRNA degradation studies are often performed in response to a strong extracellular stimulus, causing expression level changes in a plethora of genes. LITEs may be utilized to reversibly induce transcription of an endogenous target, after which point stimulation may be stopped and the degradation kinetics of the unique target may be tracked.

[0416] The temporal precision of LITEs may provide the power to time genetic regulation in concert with experimental interventions. For example, targets with suspected involvement in long-term potentiation (LTP) may be modulated in organotypic or dissociated neuronal cultures, but only during stimulus to induce LTP, so as to avoid interfering with the normal development of the cells. Similarly, in cellular models exhibiting disease phenotypes, targets suspected to be involved in the effectiveness of a particular therapy may be modulated only during treatment. Conversely, genetic targets may be modulated only during a pathological stimulus. Any number of experiments in which timing of genetic cues to external experimental stimuli is of relevance may potentially benefit from the utility of LITE modulation.

[0417] The in vivo context offers equally rich opportunities for the use of LITEs to control gene expression. As mentioned above, photoinducibility provides the potential for previously unachievable spatial precision. Taking advantage of the development of optrode technology, a stimulating fiber optic lead may be placed in a precise brain region. Stimulation region size may then be tuned by light intensity. This may be done in conjunction with the delivery of LITEs via viral vectors, or, if transgenic LITE animals were to be made available, may eliminate the use of viruses while still allowing for the modulation of gene expression in precise brain regions. LITEs may be used in a transparent organism, such as an immobilized zebrafish, to allow for extremely precise laser induced local gene expression changes.

[0418] LITEs may also offer valuable temporal precision in vivo. LITEs may be used to alter gene expression during a particular stage of development, for example, by repressing a particular apoptosis gene only during a particular stage of C. elegans growth. LITEs may be used to time a genetic cue to a particular experimental window. For example, genes implicated in learning may be overexpressed or repressed only during the learning stimulus in a precise region of the intact rodent or primate brain. Further, LITEs may be used to induce gene expression changes only during particular stages of disease development. For example, an oncogene may be overexpressed only once a tumor reaches a particular size or metastatic stage. Conversely, proteins suspected in the development of Alzheimer's may be knocked down only at defined time points in the animal's life and within a particular brain region. Although these examples do not exhaustively list the potential applications of the LITE system, they highlight some of the areas in which LITEs may be a powerful technology.

### Example 3

### Development of Manmmalian TALE Transcriptional Repressors

[0419] Applicants developed mammalian TALE repressor architectures to enable researchers to suppress transcription of endogenous genes. TALE repressors have the potential to suppress the expression of genes as well as non-coding transcripts such as microRNAs, rendering them a highly desirable tool for testing the causal role of specific genetic elements. In order to identify a suitable repression domain for use with TALEs in mammalian cells, a TALE targeting the promoter of the human SOX2 gene was used to evaluate the transcriptional repression activity of a collection of candidate repression domains (FIG. 12a). Repression domains across a range of eukaryotic host species were selected to increase the chance of finding a potent synthetic repressor, including the PIE-1 repression domain (PIE-1) (Batchelder, C, et al. Transcriptional repression by the Caenorhabditis elegans germ-line protein PIE-1. Genes Dev. 13, 202-212 (1999)) from Caenorhabditis elegans, the QA domain within the Ubx gene (Ubx-QA) (Tour, E., Hittinger, C. T. & McGinnis, W. Evolutionarily conserved domains required for activation and repression functions of the Drosophila Hox protein Ultrabithorax. Development 132, 5271-5281 (2005)) from Drosophila melanogaster, the IAA28 repression domain (IAA28-RD)(4) from Arabidopsis thaliana, the mSin interaction domain (SID) (Ayer, D. E., Laherty, C. D., Lawrence, Q. A., Armstrong, A. P. & Eisenman, R. N. Mad proteins contain a dominant transcription repression domain. Mol. Cell. Biol. 16, 5772-5781 (1996)). Tbx3 repression domain (Tbx3-RD), and the Krüppel-associated box (KRAB) (Margolin, J. F, et al. Kruppel-associated boxes are potent transcriptional repression domains. Proc. Natl. Acad. Sci. USA 91, 4509-4513 (1994)) repression domain from Homo Sapiens. Since different truncations of KRAB have been known to exhibit varying levels of transcriptional repression (Margolin, J. F, et al. Kruppel-associated boxes are potent transcriptional repression domains. Proc. Natl. Acad. Sci. USA 91, 4509-4513 (1994)), three different truncations of KRAB were tested (FIG. 12c). These candidate TALE repressors were expressed in HEK 293FTcells and it was found that TALEs carrying two widely used mammalian transcriptional repression domains, the SID (Ayer, D. E., Laherty, C. D., Lawrence, Q. A., Armstrong, A. P. & Eisenman, R. N. Mad proteins contain a dominant transcription repression domain. Mol. Cell. Biol. 16, 5772-5781 (1996)) and KRAB (Margolin, J. F, et al. Kruppel-associated boxes are potent transcriptional repression domains. Proc. Natl. Acad. Sci. USA 91, 4509-4513 (1994)) domains, were able to repress endogenous SOX2 expression, while the other domains had little effect on transcriptional activity (FIG. 12c). To control for potential perturbation of SOX2 transcription due to TALE binding, expression of the SOX2-targeting TALE DNA binding domain alone without any effector domain had no effect (similar to mock or expression of GFP) on the transcriptional activity of SOX2 (FIG. 12c, Null condition). Since the SID domain was able to achieve 26% more transcriptional repression of the endogenous SOX2 locus than the KRAB domain (FIG. 12c), it was decided to use the SID domain for subsequent studies.

[0420] To further test the effectiveness of the SID repressor domain for down regulating endogenous transcription, SID was combined with CACNA1C-target TALEs from the previous experiment (FIG. 12d). Using qRT-PCR, it was found that replacement of the VP64 domain on CACNA1C-targeting TALEs with SID was able to repress CACNA1C transcription. The NH-containing TALE repressor was able to achieve a similar level of transcriptional repression as the NN-containing TALE (˜4 fold repression), while the TALE repressor using NK was significantly less active (˜2 fold repression) (FIG. 12d). These data demonstrate that SID is indeed a suitable repression domain, while also further supporting NH as a more suitable G-targeting RVD than NK.

[0421] TALEs may be easily customized to recognize specific sequences on the endogenous genome. Here, a series of screens were conducted to address two important limitations of the TALE toolbox. Together, the identification of a more stringent G-specific RVD with uncompromised activity strength as well as a robust TALE repressor architecture further expands the utility of TALEs for probing mammalian transcription and genome function.

[0422] After identifying SID (mSin interaction domain) as a robust novel repressor domain to be used with TALEs, more active repression domain architecture based on SID domain for use with TALEs in mammalian cells were further designed and verified. This domain is called SID4X, which is a tandem repeat of four SID domains linked by short peptide linkers. For testing different TALE repressor architectures, a TALE targeting the promoter of the mouse (Mus musculus) p11 (s100a10) gene was used to evaluate the transcriptional repression activity of a series of candidate TALE repressor architectures (FIG. 13a). Since different truncations of TALE are known to exhibit varying levels of transcriptional activation activity, two different truncations of TALE fused to SID or SID4X domain were tested, one version with 136 and 183 amino acids at N- and C-termini flanking the DNA binding tandem repeats, with another one retaining 240 and 183 amino acids at N- and C-termini (FIG. 13b, c). The candidate TALE repressors were expressed in mouse Neuro2A cells and it was found that TALEs carrying both SID and SID4X domains were able to repress endogenous p11 expression up to 4.8 folds, while the GFP-encoding negative control construct had no effect on transcriptional of target gene (FIG. 13b, c). To control for potential perturbation of p11 transcription due to TALE binding, expression of the p11-targeting TALE DNA binding domain (with the same N- and C-termini truncations as the tested constructs) without any effector domain had no effect on the transcriptional activity of endogenous p11 (FIG. 13b, c, null constructs).

[0423] Because the constructs harboring SID4X domain were able to achieve 167% and 66% more transcriptional repression of the endogenous p11 locus than the SID domain depending on the truncations of TALE DNA binding domain (FIG. 13c), it was concluded that a truncated TALE DNA binding domain, bearing 136 and 183 amino acids at N- and C-termini respectively, fused to the SID4X domain is a potent TALE repressor architecture that enables down-regulation of target gene expression and is more active than the previous design employing SID domain.

[0424] The mSin interaction domain (SID) and SID4X domain were codon optimized for mammalian expression and synthesized with flanking NheI and XbaI restriction sites (Genscript). Truncation variants of the TALE DNA binding domains are PCR amplified and fused to the SID or the SID4X domain using NheI and XbaI restriction sites. To control for any effect on transcription resulting from TALE binding, expression vectors carrying the TALE DNA binding domain alone using PCR cloning were constructed. The coding regions of all constructs were completely verified using Sanger sequencing. A comparison of two different types of TALE architecture is seen in FIG. 14.

### Example 4

### Development of Mammalian TALE Transcriptional Activators and Nucleases

[0425] Customized TALEs may be used for a wide variety of genome engineering applications, including transcriptional modulation and genome editing. Here, Applicants describe a toolbox for rapid construction of custom TALE transcription factors (TALE-TFs) and nucleases (TALENs) using a hierarchical ligation procedure. This toolbox facilitates affordable and rapid construction of custom TALE-TFs and TALENs within 1 week and may be easily scaled up to construct TALEs for multiple targets in parallel. Applicants also provide details for testing the activity in mammalian cells of custom TALE-TFs and TALENs using quantitative reverse-transcription PCR and Surveyor nuclease, respectively. The TALE toolbox will enable a broad range of biological applications.

[0426] TALEs are natural bacterial effector proteins used by Xanthomonas sp, to modulate gene transcription in host plants to facilitate bacterial colonization (Boch, J. & Bonas, U. Xanthomonas AvrBs3 family-type III effectors: discovery and function. Annu. Rev. Phytopathol. 48, 419-436 (2010) and Bogdanove, A. J., Schornack, S. & Lahaye, T. TAL effectors: finding plant genes for disease and defense. Curr. Opin. Plant Biol. 13, 394-401 (2010)). The central region of the protein contains tandem repeats of 34-aa sequences (termed monomers) that are required for DNA recognition and binding (Romer, P, et al. Plant pathogen recognition mediated by promoter activation of the pepper Bs3 resistance gene. Science 318, 645-648 (2007); Kay, S., Hahn, S., Marois, E., Hause, G. & Bonas, U. A bacterial effector acts as a plant transcription factor and induces a cell size regulator. Science 318, 648-651 (2007); Kay. S., Hahn, S., Marois, E., Wieduwild, R. & Bonas, U. Detailed analysis of the DNA recognition motifs of the Xanthomonas type III effectors AvrBs3 and AvrBs3Deltarep16. Plant J. 59, 859-871 (2009) and Romer, P, et al. Recognition of AvrBs3-like proteins is mediated by specific binding to promoters of matching pepper Bs3 alleles. Plant Physiol. 150, 1697-1712 (2009).) (FIG. 8). Naturally occurring TALEs have been found to have a variable number of monomers, ranging from 1.5 to 33.5 (Boch, J. & Bonas, U. Xanthomonas AvrBs3 family-type III effectors: discovery and function. Annu. Rev. Phytopathol. 48, 419-436 (2010)). Although the sequence of each monomer is highly conserved, they differ primarily in two positions termed the repeat variable diresidues (RVDs, 12th and 13th positions). Recent reports have found that the identity of these two residues determines the nucleotide-binding specificity of each TALE repeat and that a simple cipher specifies the target base of each RVD (NI=A, HD=C, NG=T, NN=G or A) (Boch, J, et al. Breaking the code of DNA binding specificity of TAL-type II effectors. Science 326, 1509-1512 (2009) and Moscou, M. J. & Bogdanove, A. J. A simple cipher governs DNA recognition by TAL effectors. Science 326, 1501 (2009)). Thus, each monomer targets one nucleotide and the linear sequence of monomers in a TALE specifies the target DNA sequence in the 5′ to 3′ orientation. The natural TALE-binding sites within plant genomes always begin with a thymine (Boch, J, et al. Breaking the code of DNA binding specificity of TAL-type III effectors. Science 326, 1509-1512 (2009) and Moscou, M. J. & Bogdanove, A. J. A simple cipher governs DNA recognition by TAL effectors. Science 326, 1501 (2009)), which is presumably specified by a cryptic signal within the nonrepetitive N terminus of TALEs. The tandem repeat DNA-binding domain always ends with a half-length repeat (0.5 repeat, FIG. 8). Therefore, the length of the DNA sequence being targeted is equal to the number of full repeat monomers plus two.

[0427] In plants, pathogens are often host-specific. For example, Fusarium oxysporum f, sp. lycopersici causes tomato wilt but attacks only tomato, and F. oxysporum f, dianthii Puccinia graminis f, sp. tritici attacks only wheat. Plants have existing and induced defenses to resist most pathogens. Mutations and recombination events across plant generations lead to genetic variability that gives rise to susceptibility, especially as pathogens reproduce with more frequency than plants. In plants there can be non-host resistance, e.g., the host and pathogen are incompatible. There can also be Horizontal Resistance, e.g., partial resistance against all races of a pathogen, typically controlled by many genes and Vertical Resistance, e.g., complete resistance to some races of a pathogen but not to other races, typically controlled by a few genes. In a Gene-for-Gene level, plants and pathogens evolve together, and the genetic changes in one balance changes in other. Accordingly, using Natural Variability, breeders combine most useful genes for Yield, Quality, Uniformity, Hardiness, Resistance. The sources of resistance genes include native or foreign Varieties, Heirloom Varieties, Wild Plant Relatives, and Induced Mutations, e.g., treating plant material with mutagenic agents. Using the present invention, plant breeders are provided with a new tool to induce mutations. Accordingly, one skilled in the art can analyze the genome of sources of resistance genes, and in Varieties having desired characteristics or traits employ the present invention to induce the rise of resistance genes, with more precision than previous mutagenic agents and hence accelerate and improve plant breeding programs.

[0428] Applicants have further improved the TALE assembly system with a few optimizations, including maximizing the dissimilarity of ligation adaptors to minimize misligations and combining separate digest and ligation steps into single Golden Gate (Engler, C., Kandzia, R. & Marillonnet, S. A one pot, one step, precision cloning method with high throughput capability. PLoS ONE 3, e3647 (2008); Engler, C., Gruetzner, R., Kandzia, R. & Marillonnet, S. Golden gate shuffling: a one-pot DNA shuffling method based on type IIs restriction enzymes. PLoS ONE 4, e5553 (2009) and Weber, E., Engler, C., Gruetzner, R., Werner, S. & Marillonnet, S. A modular cloning system for standardized assembly of multigene constructs. PLoS ONE 6, e16765 (2011)) reactions. Briefly, each nucleotide-specific monomer sequence is amplified with ligation adaptors that uniquely specify the monomer position within the TALE tandem repeats. Once this monomer library is produced, it may conveniently be reused for the assembly of many TALEs. For each TALE desired, the appropriate monomers are first ligated into hexamers, which are then amplified via PCR. Then, a second Golden Gate digestion-ligation with the appropriate TALE cloning backbone (FIG. 8) yields a fully assembled, sequence-specific TALE. The backbone contains a ccdB negative selection cassette flanked by the TALE N and C termini, which is replaced by the tandem repeat DNA-binding domain when the TALE has been successfully constructed, ccdB selects against cells transformed with an empty backbone, thereby yielding clones with tandem repeats inserted (Cermak, T, et al. Efficient design and assembly of custom TALEN and other TAL effector-based constructs for DNA targeting. Nucleic Acids Res. 39, e82 (2011)).

[0429] Assemblies of monomeric DNA-binding domains may be inserted into the appropriate TALE-TF or TALEN cloning backbones to construct customized TALE-TFs and TALENs. TALE-TFs are constructed by replacing the natural activation domain within the TALE C terminus with the synthetic transcription activation domain VP64 (Zhang, F, et al. Efficient construction of sequence-specific TAL effectors for modulating mammalian transcription. Nat. Biotechnol. 29, 149-153 (2011); FIG. 8). By targeting a binding site upstream of the transcription start site, TALE-TFs recruit the transcription complex in a site-specific manner and initiate gene transcription. TALENs are constructed by fusing a C-terminal truncation (+63 aa) of the TALE DNA-binding domain (Miller, J. C, et al. A TALE nuclease architecture for efficient genome editing. Nat. Biotechnol. 29, 143-148 (2011)) with the nonspecific FokI endonuclease catalytic domain (FIG. 14). The +63-aa C-terminal truncation has also been shown to function as the minimal C terminus sufficient for transcriptional modulation (Zhang, F, et al. Efficient construction of sequence-specific TAL effectors for modulating mammalian transcription. Nat. Biotechnol. 29, 149-153 (2011)). TALENs form dimers through binding to two target sequences separated by ˜17 bases. Between the pair of binding sites, the FokI catalytic domains dimerize and function as molecular scissors by introducing double-strand breaks (DSBs; FIG. 8). Normally, DSBs are repaired by the nonhomologous end-joining (Huertas, P. DNA resection in eukaryotes: deciding how to fix the break. Nat. Struct. Mol. Biol. 17, 11-16 (2010)) pathway (NHEJ), resulting in small deletions and functional gene knockout. Alternatively, TALEN-mediated DSBs may stimulate homologous recombination, enabling site-specific insertion of an exogenous donor DNA template (Miller, J. C, et al. A TALE nuclease architecture for efficient genome editing. Nat. Biotechnol. 29, 143-148 (2011) and Hockemeyer, D, et al. Genetic engineering of human pluripotent cells using TALE nucleases. Nat. Biotechnol. 29, 731-734 (2011)).

[0430] Along with the TALE-TFs being constructed with the VP64 activation domain, other embodiments of the invention relate to TALE polypeptides being constructed with the VP16 and p65 activation domains. A graphical comparison of the effect these different activation domains have on Sox2 mRNA level is provided in FIG. 11.

### Example 5

[0431] FIG. 17 depicts an effect of cryptochrome2 heterodimer orientation on LITE functionality. Two versions of the Neurogenin 2 (Neurog2) LITE were synthesized to investigate the effects of cryptochrome 2 photolyase homology region (CRY2PHR)/calcium and integrin-binding protein 1 (CIB1) dimer orientation. In one version, the CIB1 domain was fused to the C-terminus of the TALE (Neurog2) domain, while the CRY2PHR domain was fused to the N-terminus of the VP64 domain. In the converse version, the CRY2PHR domain was fused to the C-terminus of the TALE (Neurog2) domain, while the CIB1 domain was fused to the N-terminus of the VP64 domain. Each set of plasmids were transfected in Neuro2a cells and stimulated (466 nm, 5 mW/cm², 1 sec pulse per 15 sec, 12 h) before harvesting for qPCR analysis. Stimulated LITE and unstimulated LITE Neurog2 expression levels were normalized to Neurog2 levels from stimulated GFP control samples. The TALE-CRY2PHR/CIB1-VP64 LITE exhibited elevated basal activity and higher light induced Neurog2 expression, and suggested its suitability for situations in which higher absolute activation is required. Although the relative light inducible activity of the TALE-CIB1/CRY2PHR-VP64 LITE was lower that its counterpart, the lower basal activity suggested its utility in applications requiring minimal baseline activation. Further, the TALE-CIB1 construct was smaller in size, compared to the TALE-CRY2PHR construct, a potential advantage for applications such as viral packaging.

[0432] FIG. 18 depicts metabotropic glutamate receptor 2 (mGlur2) LITE activity in mouse cortical neuron culture. A mGluR2 targeting LITE was constructed via the plasmids pAAV-human Synapsin I promoter (hSyn)-HA-TALE(mGluR2)-CIB1 and pAAV-hSyn-CRY2PHR-VP64-2A-GFP. These fusion constructs were then packaged into adeno associated viral vectors (AAV). Additionally, AAV carrying hSyn-TALE-VP64-2A-GFP and GFP only were produced. Embryonic mouse (E116) cortical cultures were plated on Poly-L-lysine coated 24 well plates. After 5 days in vitro neural cultures were co-transduced with a mixture ofTALE(mGluR2)-CIB1 and CRY2PHR-VP64 AAV stocks. Control samples were transduced with either TALE(mGluR2)-VP64 AAV or GFP AAV. 6 days after AAV transduction, experimental samples were stimulated using either of two light pulsing paradigms: 0.5 s per min and 0.25 sec per 30 sec. Neurons were stimulated for 24 h and harvested for qPCR analysis. All mGluR2 expression levels were normalized to the respective stimulated GFP control. The data suggested that the LITE system could be used to induce the light-dependent activation of a target gene in primary neuron cultures in vitro.

[0433] FIG. 19 depicts transduction of primary mouse neurons with LITE AAV vectors. Primary mouse cortical neuron cultures were co-transduced at 5 days in vitro with AAV vectors encoding hSyn-CRY2PHR-VP64-2A-GFP and hSyn-HA-TALE-CIB1, the two components of the LITE system. Left panel: at 6 days after transduction, neural cultures exhibited high expression of GFP from the hSyn-CRY2PHR-VP64-2A-GFP vector. Right panel: Co-transduced neuron cultures were fixed and stained with an antibody specific to the HA epitope on the N-terminus of the TALE domain in hSyn-HA-TALE-CIB1. Red signal indicated HA expression, with particularly strong nuclear signal (DNA stained by DAPI in blue channel). Together these images suggested that the expression of each LITE component could be achieved in primary mouse neuron cultures. (scale bars=50 um).

[0434] FIG. 20 depicts expression of a LITE component in vivo. An AAV vector of seratype 1/2 carrying hSyn-CRY2PHR-VP64 was produced via transfection of HEK293FT cells and purified via heparin column binding. The vector was concentrated for injection into the intact mouse brain. 1 uL of purified AAV stock was injected into the hippocampus and infralimbic cortex of an 8 week old male C57BL/6 mouse by steroeotaxic surgery and injection. 7 days after in vivo transduction, the mouse was euthanized and the brain tissue was fixed by paraformaldehyde perfusion. Slices of the brain were prepared on a vibratome and mounted for imaging. Strong and widespread GFP signals in the hippocampus and infralimbic cortex suggested efficient transduction and high expression of the LITE component CRY2PHR-VP64.

### Example 6

### Improved Design by Using NES Element

[0435] Estrogen receptor T2 (ERT2) has a leakage issue. The ERT2 domain would enter the nucleus even in the absence of 4-Hydroxytestosterone (4OHT), leading to a background level of activation of target gene by TAL. NES (nuclear exporting signal) is a peptide signal that targets a protein to the cytoplasm of a living cell. By adding NES to an existing construct, Applicants aim to prevent the entering of ERT2-TAL protein into nucleus in the absence of 4OHT, lowering the background activation level due to the “leakage” of the ERT2 domain.

[0436] FIG. 21 depicts an improved design of the construct where the specific NES peptide sequence used is LDLASLIL (SEQ ID NO: 6).

[0437] FIG. 22 depicts Sox2 mRNA levels in the absence and presence of 40H tamoxifen. Y-axis is Sox2 mRNA level as measured by qRT-PCR. X-axis is a panel of different construct designs described on top. Plus and minus signs indicate the presence or absence of 0.5 uM 4OHT.

### Example 7

### Multiplex Genome Engineering Using CRISPR/Cas Systems

[0438] Functional elucidation of causal genetic variants and elements requires precise genome editing technologies. The type II prokaryotic CRISPR (clustered regularly interspaced short palindromic repeats) adaptive immune system has been shown to facilitate RNA-guided site-specific DNA cleavage. Applicants engineered two different type II CRISPR systems and demonstrate that Cas9 nucleases can be directed by short RNAs to induce precise cleavage at endogenous genomic loci in human and mouse cells. Cas9 can also be converted into a nicking enzyme to facilitate homology-directed repair with minimal mutagenic activity. Finally, multiple guide sequences can be encoded into a single CRISPR array to enable simultaneous editing of several sites within the mammalian genome, demonstrating easy programmability and wide applicability of the CRISPR technology.

[0439] Prokaryotic CRISPR adaptive immune systems can be reconstituted and engineered to mediate multiplex genome editing in mammalian cells.

[0440] Precise and efficient genome targeting technologies are needed to enable systematic reverse engineering of causal genetic variations by allowing selective perturbation of individual genetic elements. Although genome-editing technologies such as designer zinc fingers (ZFs) (M. H. Porteus, D. Baltimore, Chimeric nucleases stimulate gene targeting in human cells. Science 300, 763 (May 2, 2003); J. C. Miller et al., An improved zinc-finger nuclease architecture for highly specific genome editing. Nat Biotechnol 25, 778 (July, 2007); J. D. Sander et al., Selection-free zinc-finger-nuclease engineering by context-dependent assembly (CoDA). Nat Methods 8, 67 (January 2011) and A. J. Wood et al., Targeted genome editing across species using ZFNs and TALENs. Science 333, 307 (Jul. 15, 2011)), transcription activator-like effectors (TALEs) (A. J. Wood et al., Targeted genome editing across species using ZFNs and TALENs. Science 333, 307 (Jul. 15, 2011); M. Christian et al., Targeting DNA double-strand breaks with TAL effector nucleases. Genetics 186, 757 (October, 2010); F. Zhang et al., Efficient construction of sequence-specific TAL effectors for modulating mammalian transcription. Nat Biotechnol 29, 149 (February, 2011); J. C. Miller et al., A TALE nuclease architecture for efficient genome editing. Nat Biotechnol 29, 143 (February 2011); D. Reyon et al., FLASH assembly of TALENs for high-throughput genome editing. Nat Biotechnol 30, 460 (May, 2012); J. Boch et al., Breaking the code of DNA binding specificity of TAL-type III effectors. Science 326, 1509 (Dec. 11, 2009) and M. J. Moscou, A. J. Bogdanove, A simple cipher governs DNA recognition by TAL effectors. Science 326, 1501 (Dec. 11, 2009)), and homing meganucleases (B. L. Stoddard, Homing endonuclease structure and function. Quarterly reviews of biophysics 38, 49 (February, 2005)) have begun to enable targeted genome modifications, there remains a need for new technologies that are scalable, affordable, and easy to engineer. Here, Applicants report the development of a new class of precision genome engineering tools based on the RNA-guided Cas9 nuclease (M. Jinek et al., A programmable dual-RNA-guided DNA endonuclease in adaptive bacterial immunity. Science 337, 816 (Aug. 17, 2012); G. Gasiunas, R. Barrangou, P. Horvath, V. Siksnys. Cas9-crRNA ribonucleoprotein complex mediates specific DNA cleavage for adaptive immunity in bacteria. Proc Natl Acad Sci USA 109, E2579 (Sep. 25, 2012) and J. E. Garneau et al., The CRISPR/Cas bacterial immune system cleaves bacteriophage and plasmid DNA. Nature 468, 67 (Nov. 4, 2010)) from the type II prokaryotic CRISPR adaptive immune system (H. Deveau, J. E. Garneau, S. Moineau, CRISPR/Cas system and its role in phage-bacteria interactions. Annual review of microbiology 64, 475 (2010); P. Horvath, R. Barrangou, CRISPR/Cas, the immune system of bacteria and archaea. Science 327, 167 (Jan. 8, 2010); K. S. Makarova et al., Evolution and classification of the CRISPR-Cas systems. Nat Rev Microbiol 9, 467 (Jun, 2011) and D. Bhaya, M. Davison, R. Barrangou, CRISPR-Cas systems in bacteria and archaea: versatile small RNAs for adaptive defense and regulation. Annu Rev Genet 45, 273 (2011)).

[0441] The Streptococcus pyogenes SF370 type 11 CRISPR locus consists of four genes, including the Cas9 nuclease, as well as two non-coding RNAs: tracrRNA and a pre-crRNA array containing nuclease guide sequences (spacers) interspaced by identical direct repeats (DRs) (FIG. 27) (E. Deltcheva et al., CRISPR RNA maturation by trans-encoded small RNA and host factor RNase III. Nature 471, 602 (Mar. 31, 2011)). Applicants sought to harness this prokaryotic RNA-programmable nuclease system to introduce targeted double stranded breaks (DSBs) in mammalian chromosomes through heterologous expression of the key components. It has been previously shown that expression of tracrRNA, pre-crRNA, host factor RNase III, and Cas9 nuclease are necessary and sufficient for cleavage of DNA in vitro (M. Jinek et al., A programmable dual-RNA-guided DNA endonuclease in adaptive bacterial immunity. Science 337, 816 (Aug. 17, 2012) and G. Gasiunas, R. Barrangou, P. Horvath, V. Siksnys, Cas9-crRNA ribonucleoprotein complex mediates specific DNA cleavage for adaptive immunity in bacteria. Proc Natl Acad Sci USA 109, E2579 (Sep. 25, 2012)) and in prokaryotic cells (R. Sapranauskas et al., The Streptococcus thermophilus CRISPR/Cas system provides immunity in Escherichia coli. Nucleic Acids Res 39, 9275 (November, 2011) and A. H. Magadan, M. E. Dupuis, M. Villion. S. Moineau, Cleavage of phage DNA by the Streptococcus thermophilus CRISPR3-Cas system. PLoS One 7, e40913 (2012)). Applicants codon optimized the S. pyogenes Cas9 (SpCas9) and RNase III (SpRNase III) and attached nuclear localization signals (NLS) to ensure nuclear compartmentalization in mammalian cells. Expression of these constructs in human 293FT cells revealed that two NLSs are required for targeting SpCas9 to the nucleus (FIG. 23A). To reconstitute the non-coding RNA components of CRISPR. Applicants expressed an 89-nucleotide (nt) tracrRNA (FIG. 28) under the RNA polymerase III U6 promoter (FIG. 23B). Similarly, Applicants used the U6 promoter to drive the expression of a pre-crRNA array comprising a single guide spacer flanked by DRs (FIG. 23B). Applicants designed an initial spacer to target a 30-basepair (bp) site (protospacer) in the human EMX1 locus that precedes an NGG, the requisite protospacer adjacent motif (PAM) (FIG. 23C and FIG. 27) (H. Deveau et al., Phage response to CRISPR-encoded resistance in Streptococcus thermophilus. J Bacteriol 190, 1390 (February, 2008) and F. J. Mojica, C. Diez-Villasenor, J. Garcia-Martinez, C. Almendros, Short motif sequences determine the targets of the prokaryotic CRISPR defence system. Microbiology 155, 733 (March, 2009)).

[0442] To test whether heterologous expression of the CRISPR system (SpCas9, SpRNase III, tracrRNA, and pre-crRNA) can achieve targeted cleavage of mammalian chromosomes, Applicants transfected 293FT cells with different combinations of CRISPR components. Since DSBs in mammalian DNA are partially repaired by the indel-forming non-homologous end joining (NHEJ) pathway, Applicants used the SURVEYOR assay (FIG. 29) to detect endogenous target cleavage (FIG. 23D and FIG. 28B). Co-transfection of all four required CRISPR components resulted in efficient cleavage of the protospacer (FIG. 23D and FIG. 28B), which is subsequently verified by Sanger sequencing (FIG. 23E). Interestingly, SpRNase III was not necessary for cleavage of the protospacer (FIG. 23D), and the 89-nt tracrRNA is processed in its absence (FIG. 28C). Similarly, maturation of pre-crRNA does not require RNase III (FIG. 23D and FIG. 30), suggesting that there may be endogenous mammalian RNases that assist in pre-crRNA maturation (M. Jinek, J. A. Doudna, A three-dimensional view of the molecular machinery of RNA interference. Nature 457, 405 (Jan. 22, 2009); C. D. Malone, G. J. Hannon, Small RNAs as guardians of the genome. Cell 136, 656 (Feb. 20, 2009) and G. Meister, T. Tuschl, Mechanisms of gene silencing by double-stranded RNA. Nature 431, 343 (Sep. 16, 2004)). Removing any of the remaining RNA or Cas9 components abolished the genome cleavage activity of the CRISPR system (FIG. 23D). These results define a minimal three-component system for efficient CRISPR-mediated genome modification in mammalian cells.

[0443] Next, Applicants explored the generalizability of CRISPR-mediated cleavage in eukaryotic cells by targeting additional protospacers within the EMX1 locus (FIG. 24A). To improve co-delivery, Applicants designed an expression vector to drive both pre-crRNA and SpCas9 (FIG. 31). In parallel, Applicants adapted a chimeric crRNA-tracrRNA hybrid (FIG. 24B, top) design recently validated in vitro (M. Jinek et al., A programmable dual-RNA-guided DNA endonuclease in adaptive bacterial immunity. Science 337, 816 (Aug. 17, 2012)), where a mature crRNA is fused to a partial tracrRNA via a synthetic stem-loop to mimic the natural crRNA:tracrRNA duplex (FIG. 24B, bottom). Applicants observed cleavage of all protospacer targets when SpCas9 is co-expressed with pre-crRNA (DR-spacer-DR) and tracrRNA. However, not all chimeric RNA designs could facilitate cleavage of their genomic targets (FIG. 24C, Table 1). Applicants then tested targeting of additional genomic loci in both human and mouse cells by designing pre-crRNAs and chimeric RNAs targeting the human PVALB and the mouse Th loci (FIG. 32). Applicants achieved efficient modification at all three mouse Th and one PV4LB targets using the crRNA:tracrRNA design, thus demonstrating the broad applicability of the CRISPR system in modifying different loci across multiple organisms (Table 1). For the same protospacer targets, cleavage efficiencies of chimeric RNAs were either lower than those of crRNA:tracrRNA duplexes or undetectable. This may be due to differences in the expression and stability of RNAs, degradation by endogenous RNAi machinery, or secondary structures leading to inefficient Cas9 loading or target recognition.

[0444] Effective genome editing requires that nucleases target specific genomic loci with both high precision and efficiency. To investigate the specificity of CRISPR-mediated cleavage, Applicants analyzed single-nucleotide mismatches between the spacer and its mammalian protospacer target (FIG. 25A). Applicants observed that single-base mismatch up to 12-bp 5′ of the PAM completely abolished genomic cleavage by SpCas9, whereas spacers with mutations farther upstream retained activity against the protospacer target (FIG. 25B). This is consistent with previous bacterial and in vitro studies of Cas9 specificity (M. Jinek et al., A programmable dual-RNA-guided DNA endonuclease in adaptive bacterial immunity. Science 337, 816 (Aug. 17, 2012) and R. Sapranauskas et al., The Streptococcus thermophilus CRISPRCas system provides immunity in Escherichia coli. Nucleic Acids Res 39, 9275 (November, 2011)). Furthermore, CRISPR is able to mediate genomic cleavage as efficiently as a pair of TALE nucleases (TALEN) targeting the same EMX1 protospacer (FIGS. 25, C and D).

[0445] Targeted modification of genomes ideally avoids mutations arising from the error-prone NHEJ mechanism. The wild-type SpCas9 is able to mediate site-specific DSBs, which can be repaired through either NHEJ or homology-directed repair (HDR). Applicants engineered an aspartate-to-alanine substitution (D10A) in the RuvC I domain of SpCas9 to convert the nuclease into a DNA nickase (SpCas9n, FIG. 26A) (M. Jinek et al., A programmable dual-RNA-guided DNA endonuclease in adaptive bacterial immunity. Science 337, 816 (Aug. 17, 2012); G. Gasiunas. R. Barrangou. P. Horvath, V. Siksnys, Cas9-crRNA ribonucleoprotein complex mediates specific DNA cleavage for adaptive immunity in bacteria. Proc Natl Acad Sci USA 109, E2579 (Sep. 25, 2012) and R. Sapranauskas et al., The Streptococcus thermophilus CRISPR/Cas system provides immunity in Escherichia coli. Nucleic Acids Res 39, 9275 (November 2011)), because nicked genomic DNA is typically repaired either seamlessly or through high-fidelity HDR. SURVEYOR (FIG. 26B) and sequencing of 327 amplicons did not detect any indels induced by SpCas9n. However, it is worth noting that nicked DNA can in rare cases be processed via a DSB intermediate and result in a NHEJ event (M. T. Certo et al., Tracking genome engineering outcome at individual DNA breakpoints. Nat Methods 8, 671 (August, 2011)). Applicants then tested Cas9-mediated HDR at the same EMX1 locus with a homology repair template to introduce a pair of restriction sites near the protospacer (FIG. 26C). SpCas9 and SpCas9n catalyzed integration of the repair template into EAMX1 locus at similar levels (FIG. 26D), which Applicants further verified via Sanger sequencing (FIG. 26E). These results demonstrate the utility of CRISPR for facilitating targeted genomic insertions. Given the 14-bp (12-bp from the seed sequence and 2-bp from PAM) target specificity (FIG. 25B) of the wild type SpCas9, the use of a nickase may reduce off-target mutations.

[0446] Finally, the natural architecture of CRISPR loci with arrayed spacers (FIG. 27) suggests the possibility of multiplexed genome engineering. Using a single CRISPR array encoding a pair of EMX1- and PVALB-targeting spacers, Applicants detected efficient cleavage at both loci (FIG. 26F). Applicants further tested targeted deletion of larger genomic regions through concurrent DSBs using spacers against two targets within EMX1 spaced by 119-bp, and observed a 1.6% deletion efficacy (3 out of 182 amplicons; FIG. 26G), thus demonstrating the CRISPR system can mediate multiplexed editing within a single genome.

[0447] The ability to use RNA to program sequence-specific DNA cleavage defines a new class of genome engineering tools. Here, Applicants have shown that the S. pyogenes CRISPR system can be heterologously reconstituted in mammalian cells to facilitate efficient genome editing; an accompanying study has independently confirmed high efficiency CRISPR-mediated genome targeting in several human cell lines (Mali et al.). However, several aspects of the CRISPR system can be further improved to increase its efficiency and versatility. The requirement for an NGG PAM restricts the S. pyogenes CRISPR target space to every 8-bp on average in the human genome (FIG. 33), not accounting for potential constraints posed by crRNA secondary structure or genomic accessibility due to chromatin and DNA methylation states. Some of these restrictions may be overcome by exploiting the family of Cas9 enzymes and its differing PAM requirements (H. Deveau et al., Phage response to CRISPR-encoded resistance in Streptococcus thermophilus. J Bacteriol 190, 1390 (February 2008) and F. J. Mojica, C. Diez-Villasenor, J. Garcia-Martinez, C. Almendros, Short motif sequences determine the targets of the prokaryotic CRISPR defence system. Microbiology 155, 733 (March, 2009)) across the microbial diversity (K. S. Makarova et al., Evolution and classification of the CRISPR-Cas systems. Nat Rev Microbiol 9, 467 (Jun, 2011)). Indeed, other CRISPR loci are likely to be transplantable into mammalian cells; for example, the Streptococcus thermophilus LMD-9 CRISPR1 can also mediate mammalian genome cleavage (FIG. 34). Finally, the ability to carry out multiplex genome editing in mammalian cells enables powerful applications across basic science, biotechnology, and medicine (P. A. Carr, G. M. Church, Genome engineering. Nat Biotechnol 27, 1151 (December, 2009)).

### Example 8

### Multiplex Genome Engineering Using CRISPR1Cas Systems: Supplementary Material

[0448] Cell Culture and Transfection.

[0449] Human embryonic kidney (HEK) cell line 293FT (Life Technologies) was maintained in Dulbecco's modified Eagle's Medium (DMEM) supplemented with 10% fetal bovine serum (HyClone), 2 mM GlutaMAX (Life Technologies), 100U/mL penicillin, and 100 μg/mL streptomycin at 37° C., with 5% C02 incubation. Mouse neuro2A (N2A) cell line (ATCC) was maintained with DMEM supplemented with 5% fetal bovine serum (HyClone), 2 mM GlutaMAX (Life Technologies), 100U/mL penicillin, and 100 μg/mL streptomycin at 37° C., with 5% CO₂.

[0450] 293FT or N2A cells were seeded into 24-well plates (Corning) one day prior to transfection at a density of 200,000 cells per well. Cells were transfected using Lipofectamine 2000 (Life Technologies) following the manufacturer's recommended protocol. For each well of a 24-well plate a total of 800 ng plasmids was used.

[0451] Suveryor Assay and Sequencing Analysis for Genome Modification.

[0452] 293FT or N2A cells were transfected with plasmid DNA as described above. Cells were incubated at 37° C., for 72 hours post transfection before genomic DNA extraction. Genomic DNA was extracted using the QuickExtract DNA extraction kit (Epicentre) following the manufacturer's protocol. Briefly, cells were resuspended in QuickExtract solution and incubated at 65° C. for 15 minutes and 98° C., for 10 minutes.

[0453] Genomic region surrounding the CRISPR target site for each gene was PCR amplified, and products were purified using QiaQuick Spin Column (Qiagen) following manufacturer's protocol. A total of 400 ng of the purified PCR products were mixed with 2 μl 10× Taq polymerase PCR buffer (Enzymatics) and ultrapure water to a final volume of 20 μl, and subjected to a re-annealing process to enable heteroduplex formation: 95° C., for 10 min, 95° C. to 85° C. ramping at—2° C./s, 85° C., to 25° C. at—0.25° C./s, and 25° C. hold for 1 minute. After reannealing, products were treated with SURVEYOR nuclease and SURVEYOR enhancer S (Transgenomics) following the manufacturer's recommended protocol, and analyzed on 4-20 Novex TBE poly-acrylamide gels (Life Technologies). Gels were stained with SYBR Gold DNA stain (Life Technologies) for 30 minutes and imaged with a Gel Doc gel imaging system (Biorad). Quantification was based on relative band intensities.

[0454] Restriction Fragment Length Polymorphism Assay for Detection of Homologous Recombination.

[0455] HEK 293FT and N2A cells were transfected with plasmid DNA, and incubated at 37° C., for 72 hours before genomic DNA extraction as described above. The target genomic region was PCR amplified using primers outside the homology arms of the homologous recombination (HR) template. PCR products were separated on a 1% agarose gel and extracted with MinElute GelExtraction Kit (Qiagen). Purified products were digested with HindIII (Fermentas) and analyzed on a 6% Novex TBE poly-acrylamide gel (Life Technologies).

[0456] RNA Extraction and Purification.

[0457] HEK 293FT cells were maintained and transfected as stated previously. Cells were harvested by trypsinization followed by washing in phosphate buffered saline (PBS). Total cell RNA was extracted with TRI reagent (Sigma) following manufacturer's protocol. Extracted total RNA was quantified using Naonodrop (Thermo Scientific) and normalized to same concentration.

[0458] Northern Blot Analysis of crRNA and tracrRNA Expression in Mammalian Cells.

[0459] RNAs were mixed with equal volumes of 2× loading buffer (Ambion), heated to 95° C. for 5 min, chilled on ice for 1 min and then loaded onto 8% denaturing polyacrylamide gels (SequaGel, National Diagnostics) after pre-running the gel for at least 30 minutes. The samples were electrophoresed for 1.5 hours at 40 W limit. Afterwards, the RNA was transferred to Hybond N+ membrane (GE Healthcare) at 300 mA in a semi-dry transfer apparatus (Bio-rad) at room temperature for 1.5 hours. The RNA was crosslinked to the membrane using autocrosslink button on Stratagene UV Crosslinker the Stratalinker (Stratagene). The membrane was pre-hybridized in ULTRAhyb-Oligo Hybridization Buffer (Ambion) for 30 min with rotation at 42° C. and then probes were added and hybridized overnight. Probes were ordered from IDT and labeled with [gamma-32P] ATP (Perkin Elmer) with T4 polynucleotide kinase (New England Biolabs). The membrane was washed once with pre-warmed (42° C.) 2×SSC, 0.5% SDS for 1 min followed by two 30 minute washes at 42° C. The membrane was exposed to phosphor screen for one hour or overnight at room temperature and then scanned with phosphorimager (Typhoon).

TABLE 1
Protospacer sequences and modification efficiencies of mammalian genomic
targets. Protospacer targets designed based on Streptococcus pyogenes type II
CRISPR and Streptococcus thermophilus CRISPR1 loci with their requisite
PAMs against three different genes in human and mouse genomes.
Cells were transfected with Cas9 and either precrRNA/tracrRNA or chimeric RNA.
Cells were analyzed 72 hours after transfection. Percent indels are
calculated based on SURVEYOR assay results from indicated cell lines,
N = 3 for all protospacer targets, errors are S.E.M. N.D., not detectable
using the SURVEYOR assay; N.T., not tested in this study. Table 1 discloses
SEQ ID NOS 46-61, respectively, in order of appearance.

| | target | | protospacer | | | |
|---|---|---|---|---|---|---|
| Cas9 | species | gene | ID | protospacer sequence (5′ to 3′) | PAM | strand |
| S. pyogenes | Homo | EMX1 | 1 | GGAAGGGCCTGAGTCCGAGCAGAAGAAGAA | GGG | + |
| SF370 type II | sapiens | EMX1 | 2 | CATTGGAGGTGACATCGATGTCCTCCCCAT | TGG | − |
| CRISPR | | EMX1 | 3 | GGACATCGATGTCACCTCCAATGACTAGGG | TGG | + |
| | | EMX1 | 4 | CATCGATGTCCTCCCCATTGGCCTGCTTCG | TGG | − |
| | | EMX1 | 5 | TTCGTGGCAATGCGCCACCGGTTGATGTGAT | TGG | − |
| | | EMX1 | 6 | TCGTGGCAATGCGCCACCGGTTGATGTGAT | GGG | − |
| | | EMX1 | 7 | TCCAGCTTCTGCCGTTTGTACTTTGTCCTC | CGG | − |
| | | EMX1 | 8 | GGAGGGAGGGGCACAGATGAGAAACTCAGG | AGG | − |
| | Homo | PVALB | 9 | AGGGGCCGAGATTGGGTGTTCAGGGCAGAG | AGG | + |
| | sapiens | PVALB | 10 | ATGCAGGAGGGTGGCGAGAGGGGCCGAGAT | TGG | + |
| | | PVALB | 11 | GGTGGCGAGAGGGGCCGAGATTGGGTGTTC | AGG | + |
| | Mus | Th | 12 | CAAGCACTGAGTGCCATTAGCTAAATGCAT | AGG | − |
| | musculus | Th | 13 | AATGCATAGGGTACCACCCACAGGTGCCAG | GGG | − |
| | | Th | 14 | ACACACATGGGAAAGCCTCTGGGCCAGGAA | AGG | + |
| S. thermophilus | Homo | EMX1 | 15 | GGAGGAGGTAGTATACAGAAACACAGAGAA | GTAGAAT | − |
| LMD-9 CRISPR1 | sapiens | EMX1 | 16 | AGAATGTAGAGGAGTCACAGAAACTCAGCA | CTAGAAA | − |

| | | | | cell | | |
|---|---|---|---|---|---|---|
| | target | | protospacer | line | % Indol | % Indol |
| Cas9 | species | gene | ID | tested | (pre-crRNA + tracrRNA) | (chimeric RNA) |
| S. pyogenes | Homo | EMX1 | 1 | 293FT | 20 ± 1.6 | 6.7 ± 0.62 |
| SF370 type II | sapiens | EMX1 | 2 | 293FT | 2.1 ± 0.31 | N.D. |
| CRISPR | | EMX1 | 3 | 293FT | 14 ± 1.1 | N.D. |
| | | EMX1 | 4 | 293FT | 11 ± 1.7 | N.D. |
| | | EMX1 | 5 | 293FT | 4.3 ± 0.46 | 2.1 ± 0.51 |
| | | EMX1 | 6 | 293FT | 4.0 ± 0.60 | 0.41 ± 0.25 |
| | | EMX1 | 7 | 293FT | 1.5 ± 0.12 | N.D. |
| | | EMX1 | 8 | 293FT | 7.8 ± 0.83 | 2.3 ± 1.2 |
| | Homo | PVALB | 9 | 293FT | 21 ± 2.6 | 8.5 ± 0.32 |
| | sapiens | PVALB | 10 | 293FT | N.D. | N.D. |
| | | PVALB | 11 | 293FT | N.D. | N.D. |
| | Mus | Th | 12 | Neuro2A | 27 ± 4.3 | 4.1 ± 2.2 |
| | musculus | Th | 13 | Neuro2A | 4.8 ± 1.2 | N.D. |
| | | Th | 14 | Neuro2A | 11.3 ± 1.3 | N.D. |
| S. thermophilus | Homo | EMX1 | 15 | 293FT | 14 ± 0.86 | N.T. |
| LMD-9 CRISPR1 | sapiens | EMX1 | 16 | 293FT | 7.8 ± 0.77 | N.T. |

TABLE 2
Sequences for primers and probes (SEQ ID NOS 62-73, respectively, in
order of appearance) used for SURVEYOR assay, RFLP assay,
genomic sequencing, and Northern blot.

| | | Genomic | |
|---|---|---|---|
| Primer name | Assay | Target | Primer sequence |
| Sp-EMX1-F | SURVEYOR | EMX1 | AAAACCACCCTTCTCTCTGGC |
| | assay, sequencing | | |
| Sp-EMX1-R | SURVEYOR | EMX1 | GGAGATTGGAGACACGGAGAG |
| | assay, sequencing | | |
| Sp-PVALB-F | SURVEYOR | PVALB | CTGGAAAGCCAATGCCTGAC |
| | assay, sequencing | | |
| Sp-PVALB-R | SURVEYOR | PVALB | GGCAGCAAACTCCTTGTCCT |
| | assay, sequencing | | |
| Sp-Th-F | SURVEYOR | Th | GTGCTTTGCAGAGGCCTACC |
| | assay, sequencing | | |
| Sp-Th-R | SURVEYOR | Th | CCTGGAGCGCATGCAGTAGT |
| | assay, sequencing | | |
| St-EMX1-F | SURVEYOR | EMX1 | ACCTTCTGTGTTTCCACCATTC |
| | assay, sequencing | | |
| St-EMX1-R | SURVEYOR | EMX1 | TTGGGGAGTGCACAGACTTC |
| | assay, sequencing | | |
| Sp-EMX1- | RFLP, | EMX1 | GGCTCCCTGGGTTCAAAGTA |
| RFLP-F | sequencing | | |
| Sp-EMX1- | RFLP, | EMX1 | AGAGGGGTCTGGATGTCGTAA |
| RFLP-R | sequencing | | |
| Pb_EMX1_sp1 | Northern Blot | Not | TAGCTCTAAAACTTCTTCTTCTGCTCGGAC |
| | Probe | applicable | |
| Pb_tracrRNA | Northern Blot | Not | CTAGCCTTATTTTAACTTGCTATGCTGTTT |
| | Probe | applicable | |

[0460] Supplementary Sequences

> U6-short tracrRNA (Streptococcus pyogenes SF370)
(SEQ ID NO: 74)
GAGGGCCTATTTCCCATGATTCCTTCATATTTGCATATACGATACAAGGCT
GTTAGAGAGATAATTGGAATTAATTTGACTGTAAACACAAAGATATTAGTACAAAA
TACGTGACGTAGAAAGTAATAATTTCTTGGGTAGTTTGCAGTTTTAAAATTATGTTTT
AAAATGGACTATCATATGCTTACCGTAACTTGAAAGTATTTCGATTTCTTGGCTTTAT
ATATCTTGTGGAAAGGACGAAACACCGGAACCATTCAAAACAGCATAGCAAGTTAA
AATAAGGCTAGTCCGTTATCAACTTGAAAAAGTGGCACCGAGTCGGTGCTTTTTTT
> U6-long tracrRNA (Streptococcus pyogenes SF370)
(SEQ ID NO: 75)
GAGGGCCTATTTCCCATGATTCCTTCATATTTGCATATACGATACAAGGCT
GTTAGAGAGATAATTGGAATTAATTTGACTGTAAACACAAAGATATTAGTACAAAA
TACGTGACGTAGAAAGTAATAATTTCTTGGGTAGTTTGCAGTTTTAAAATTATGTTTT
AAAATGGACTATCATATGCTTACCGTAACTTGAAAGTATTTCGATTTCTTGGCTTTAT
ATATCTTGTGGAAAGGACGAAACACCGGTAGTATTAAGTATTGTTTTATGGCTGATA
AATTTCTTTGAATTTCTCCTTGATTATTTGTTATAAAAGTTATAAAATAATCTTGTTG
GAACCATTCAAAACAGCATAGCAAGTTAAAATAAGGCTAGTCCGTTATCAACTTGA
AAAAGTGGCACCGAGTCGGTGCTTTTTTT
> 56-DR-BbsI backbone-DR (Streptococcus pyogenes SF370)
(SEQ ID NO: 76)
GAGGGCCTATTTCCCATGATTCCTTCATATTTGCATATACGATACAAGGCT
GTTAGAGAGATAATTGGAATTAATTTGACTGTAAACACAAAGATATTAGTACAAAA
TACGTGACGTAGAAAGTAATAATTTCTTGGGTAGTTTGCAGTTTTAAAATTATGTTTT
AAAATGGACTATCATATGCTTACCGTAACTTGAAAGTATTTCGATTTCTTGGCTTTAT
ATATCTTGTGGAAAGGACGAAACACCGGGTTTTAGAGCTATGCTGTTTTGAATGGTC
CCAAAACGGGTCTTCGAGAAGACGTTTTAGAGCTATGCTGTTTTGAATGGTCCCAAA
AC
> U6-chimeric RNA-BbsI backbone (Streptococcus pyogenes SF370)
(SEQ ID NO: 77)
GAGGGCCTATTTCCCATGATTCCTTCATATTTGCATATACGATACAAGGCT
GTTAGAGAGATAATTGGAATTAATTTGACTGTAAACACAAAGATATTAGTACAAAA
TACGTGACGTAGAAAGTAATAATTTCTTGGGTAGTTTGCAGTTTTAAAATTATGTTTT
AAAATGGACTATCATATGCTTACCGTAACTTGAAAGTATTTCGATTTCTTGGCTTTAT
ATATCTTGTGGAAAGGACGAAACACCGGGTCTTCGAGAAGACCTGTTTTAGAGCTA
GAAATAGCAAGTTAAAATAAGGCTAGTCCG
> 3xFLAG-NLS-SpCas9-NLS
(SEQ ID NO: 78)
ATGGACTATAAGGACCACGACGGAGACTACAAGGATCATGATATTGATTA
CAAAGACGATGACGATAAGATGGCCCCAAAGAAGAAGCGGAAGGTCGGTATCCAC
GGAGTCCCAGCAGCCGACAAGAAGTACAGCATCGGCCTGGACATCGGCACCAACTC
TGTGGGCTGGGCCGTGATCACCGACGAGTACAAGGTGCCCAGCAAGAAATTCAAGG
TGCTGGGCAACACCGACCGGCACAGCATCAAGAAGAACCTGATCGGAGCCCTGCTG
TTCGACAGCGGCGAAACAGCCGAGGCCACCCGGCTGAAGAGAACCGCCAGAAGAA
GATACACCAGACGGAAGAACCGGATCTGCTATCTGCAAGAGATCTTCAGCAACGAG
ATGGCCAAGGTGGACGACAGCTTCTTCCACAGACTGGAAGAGTCCTTCCTGGTGGA
AGAGGATAAGAAGCACGAGCGGCACCCCATCTTCGGCAACATCGTGGACGAGGTGG
CCTACCACGAGAAGTACCCCACCATCTACCACCTGAGAAAGAAACTGGTGGACAGC
ACCGACAAGGCCGACCTGCGGCTGATCTATCTGGCCCTGGCCCACATGATCAAGTTC
CGGGGCCACTTCCTGATCGAGGGCGACCTGAACCCCGACAACAGCGACGTGGACAA
GCTGTTCATCCAGCTGGTGCAGACCTACAACCAGCTGTTCGAGGAAAACCCCATCAA
CGCCAGCGGCGTGGACGCCAAGGCCATCCTGTCTGCCAGACTGAGCAAGAGCAGAC
GGCTGGAAAATCTGATCGCCCAGCTGCCCGGCGAGAAGAAGAATGGCCTGTTCGGC
AACCTGATTGCCCTGAGCCTGGGCCTGACCCCCAACTTCAAGAGCAACTTCGACCTG
GCCGAGGATGCCAAACTGCAGCTGAGCAAGGACACCTACGACGACGACCTGGACAA
CCTGCTGGCCCAGATCGGCGACCAGTACGCCGACCTGTTTCTGGCCGCCAAGAACCT
GTCCGACGCCATCCTGCTGAGCGACATCCTGAGAGTGAACACCGAGATCACCAAGG
CCCCCCTGAGCGCCTCTATGATCAAGAGATACGACGAGCACCACCAGGACCTGACC
CTGCTGAAAGCTCTCGTGCGGCAGCAGCTGCCTGAGAAGTACAAAGAGATTTTCTTC
GACCAGAGCAAGAACGGCTACGCCGGCTACATTGACGGCGGAGCCAGCCAGGAAG
AGTTCTACAAGTTCATCAAGCCCATCCTGGAAAAGATGGACGGCACCGAGGAACTG
CTCGTGAAGCTGAACAGAGAGGACCTGCTGCGGAAGCAGCGGACCTTCGACAACGG
CAGCATCCCCCACCAGATCCACCTGGGAGAGCTGCACGCCATTCTGCGGCGGCAGG
AAGATTTTTACCCATTCCTGAAGGACAACCGGGAAAAGATCGAGAAGATCCTGACC
TTCCGCATCCCCTACTACCTTGGGCCCTCTGGCCAGGGGAAACAGCAGATTCGCCTGG
ATGACCAGAAAGAGCGAGGAAACCATCACCCCCTGGAACTTCGAGGAAGTGGTGGA
CAAGGGCGCTTCCGCCCAGAGCTTCATCGAGCGGATGACCAACTTCGATAAGAACC
TGCCCAACGAGAAGGTGCTGCCCAAGCACAGCCTGCTGTACGAGTACTTCACCGTGT
ATAACGAGCTGACCAAAGTGAAATACGTGACCGAGGGAATGAGAAAGCCCGCCTTC
CTGAGCGGCGAGCAGAAAAAGGCCATCGTGGACCTGCTGTTCAAGACCAACCGGAA
AGTGACCGTGAAGCAGCTGAAAGAGGACTACTTCAAGAAAATCGAGTGCTTCGACT
CCGTGGAAATCTCCGGCGTGGAAGATCGGTTCAACGCCTCCCTGGGCACATACCAC
GATCTGCTGAAAATTATCAAGGACAAGGACTTCCTGGACAATGAGGAAAACGAGGA
CATTCTGGAAGATATCGTGCTGACCCTGACACTGTTTGAGGACAGAGAGATGATCGA
GGAACGGCTGAAAACCTATGCCCACCTGTTCGACGACAAAGTGATGAAGCAGCTGA
AGCGGCGGAGATACACCGGCTGGGGCAGGCTGAGCCGGAAGCTGATCAACGGCATC
CGGGACAAGCAGTCCGGCAAGACAATCCTGGATTTCCTGAAGTCCGACGGCTTCGC
CAACAGAAACTTCATGCAGCTGATCCACGACGACAGCCTGACCTTTAAAGAGGACA
TCCAGAAAGCCCAGGTGTCCGGCCAGGGCGATAGCCTGCACGAGCACATTGCCAAT
CTGGCCGGCAGCCCCGCCATTAAGAAGGGCATCCTGCAGACAGTGAAGGTGGTGGA
CGAGCTCGTGAAAGTGATGGGCCGGCACAAGCCCGAGAACATCGTGATCGAAATGG
CCAGAGAGAACCAGACCACCCAGAAGGGACAGAAGAACAGCCGCGAGAGAATGAA
GCGGATCGAAGAGGGCATCAAAGAGCTGGGCAGCCAGATCCTGAAAGAACACCCC
GTGGAAAACACCCAGCTGCAGAACGAGAAGCTGTACCTGTACTACCTGCAGAATGG
GCGGGATATGTACGTGGACCAGGAACTGGACATCAACCGGCTGTCCGACTACGATG
TGGACCATATCGTGCCTCAGAGCTTTCTGAAGGACGACTCCATCGACAACAAGGTGC
TGACCAGAAGCGACAAGAACCGGGGCAAGAGCGACAACGTGCCCTCCGAAGAGGT
CGTGAAGAAGATGAAGAACTACTGGCGGCAGCTGCTGAACGCCAAGCTGATTACCC
AGAGAAAGTTCGACAATCTGACCAAGGCCGAGAGAGGCGGCCTGAGCGAACTGGAT
AAGGCCGGCTTCATCAAGAGACAGCTGGTGGAAACCCGGCAGATCACAAAGCACGT
GGCACAGATCCTGGACTCCCGGATGAACACTAAGTACGACGAGAATGACAAGCTGA
TCCGGGAAGTGAAAGTGATCACCCTGAAGTCCAAGCTGGTGTCCGATTTCCGGAAG
GATTTCCAGTTTTACAAAGTGCGCGAGATCAACAACTACCACCACGCCCACGACGCC
TACCTGAACGCCGTCGTGGGAACCGCCCTGATCAAAAAGTACCCTAAGCTGGAAAG
CGAGTTCGTGTACGGCGACTACAAGGTGTACGACGTGCGGAAGATGATCGCCAAGA
GCGAGCAGGAAATCGGCAAGGCTACCGCCAAGTACTTCTTCTACAGCAACATCATG
AACTTTTTCAAGACCGAGATTACCCTGGCCAACGGCGAGATCCGGAAGCGGCCTCT
GATCGAGACAAACGGCGAAACCGGGGAGATCGTGTGGGATAAGGGCCGGGATTTTG
CCACCGTGCGGAAAGTGCTGAGCATGCCCCAAGTGAATATCGTGAAAAAGACCGAG
GTGCAGACAGGCGGCTTCAGCAAAGAGTCTATCCTGCCCAAGAGGAACAGCGATAA
GCTGATCGCCAGAAAGAAGGACTGGGACCCTAAGAAGTACGGCGGCTTCGACAGCC
CCACCGTGGCCTATTCTGTGCTGGTGGTGGCCAAAGTGCTAAAAGGGCAAGTCCAAG
AAACTGAAGAGTGTGAAAGAGCTGCTGGGGATCACCATCATGGAAAGAAGCAGCTT
CGAGAAGAATCCCATCGACTTTCTGGAAGCCAAGGGCTACAAAGAAGTGAAAAAGG
ACCTGATCATCAAGCTGCCTAAGTACTCCCTGTTCGAGCTGGAAAACGGCCGGAAG
AGAATGCTGGCCTCTGCCGGCGAACTGCAGAAGGGAAACGAACTGGCCCTGCCCTC
CAAATATGTGAACTTCCTGTACCTGGCCAGCCACTATGAGAAGCTGAAGGGCTCCCC
CGAGGATAATGAGCAGAAACAGCTGTTTGTGGAACAGCACAAGCACTACCTGGACG
AGATCATCGAGCAGATCAGCGAGYTCTCCAAGAGAGTGATCCTGGCCGACGCTAAT
CTGGACAAAGTGCTGTCCGCCTACAACAAGCACCGGGATAAGCCCATCAGAGAGCA
GGCCGAGAATATCATCCACCTGTTTACCCTGACCAATCRTGGAGCCCCTGCCGCCTT
CAAGTACTTTGACACCACCATCGACCGGAAGAGGTACACCAGCACCAAAGAGGTGC
TGGACGCCACCCTGATCCACCAGAGCATCACCGGCCTGTACGAGACACGGATCGAC
CTGTCTCAGCTGGGAGGCGACAAGCGTCCTGCTGCTACTAAGAAAGCTGGTCAAGCT
AAGAAAAAGAAA
> SpRNase3-mCherry-NLS
(SEQ ID NO: 79)
ATGAAGCAGCTGGAGGAGTTACTTTCTACCTCTTTCGACATCCAGTTTAAT
GACCTGACCCTGCTGGAAACCGCCTTCACTCACACCTCCTACGCGAATGAGCACCGC
CTACTGAATGTGAGCCACAACGAGCGCCTGGAGTTTCTGGGGGATGCTGTCTTACAG
CTGATCATCTCTGAATATCTGTTTGCCAAATACCCTAAGAAAACCGAAGGGGACATG
TCAAAGCTGCGCTCCATGATAGTCAGGGAAGAGAGCCTGGCGGGCTTTAGTCGTTTT
TGCTCATTCGACGCTTATATCAAGCTGGGAAAAGGCGAAGAGAAGTCCGGCGGCAG
GAGGCGCGATACAATTCTGGGCGATCTCTTTGAAGCGTTTCTGGGCGCACTTCTACT
GGACAAAGGGATCGACGCAGTCCGCCGCTTTCTGAAACAAGTGATGATCCCTCAGG
TCGAAAAGGGAAACTTCGAGAGAGTGAAGCTACTATAAAACATGTTTGCAGGAATTTT
CTCCAGACCAAGGGAGATGTAGCAATAGATTATCAGGTAATAAGTGAGAAAGGACC
AGCTCACGCCAAACAATTCGAAGTTAGCATCGTTGTTAATGGCGCAGTGTTGTCGAA
GGGCTTGGGTAAATCAAAAAAACTGGCCGAGCAGGACGCTGCTAAAAACGCCCTCG
CTCAGCTCAGCGAGGTAGGATCCGTGAGCAAGGGCGAGGAGGATAACATGGCCATC
ATCAAGGAGTTCATGCGCTTCAAGGTGCACATGGAGGGCTCCGTGAACGGCCACGA
GTTCGAGATCGAGGGCGAGGGCGAGGGCCGCCCCTACGAGGGCACCAGACCGCCA
AGCTGAAGGTGACCAAGGGTGGCCCCCTGCCCTTCGCCTGGGACATCCTGTCCCCTC
AGTTCATGTACGGCTCCAAGGCCTACGTGAAGCACCCCGCCGACATCCCCGACTACT
TGAAGCTGTCCTTCCCCGAGGGCTTCAAGTGGGAGCGCGTGATGAACTTCGAGGAC
GGCGGCGTGGTGACCGTGACCCAGGACTCCTCCCTGCAGGAGGGCGAGTTCATCTA
CAAGGTGAAGCTGCGCGGCACCAACTTCCCCTCCGACGGCCCCGTAATGCAGAAGA
AGACCATGGGCTGGGAGGCCTCCTCCGAGCGGATGTACCCCGAGGACGGCGCCCTG
AAGGGCGAGATCAAGCAGAGGCTGAAGCTGAAGGACGGCGGCCACTACGACGCTG
AGGTCAAGACCACCTACAAGGCCAAGAAGCCCGTGCAGCTGCCCGGCGCCTACAAC
GTCAACATCAAGTTGGACATCACCTCCCACAACGAGGACTACACCATCGTGGAACA
GTACGAACGCGCCGAGGGCCGCCACTCCACCGGCGGCATGGACGAGCTGTACAAGA
AGCGTCCTGCTGCTACTAAGAAAGCTGGTCAAGCTAAGAAAAAGAAA
> 3xFLAG-NLS-SpCas9n-NLS (the D10A nickase mutation is
underlined)
(SEQ ID NO: 80)
ATGGACTATAAGGACCACGACGGAGACTACAAGGATCATGATATTGATTA
CAAAGACGATGACGATAAGATGGCCCCAAAGAAGAAGCGGAAGGTCGGTATCCAC
GGAGTCCCAGCAGCCGACAAGAAGTACAGCATCGGCCTGGCCATCGGCACCAACTC
TGTGGGCTGGGCCGTGATCACCGACGAGTACAAGGTGCCCAGCAAGAAATTCAAGG
TGCTGGGCAACACCGACCGGCACAGCATCAAGAAGAACCTGATCGGAGCCCTGCTG
TTCGACAGCGGCGAAACAGCCGAGGCCACCCGGCTGAAGAGAACCGCCAGAAGAA
GATACACCAGACGGAAGAACCGGATCTGCTATCTGCAAGAGATCTTCAGCAACGAG
ATGGCCAAGGTGGACGACAGCTTCTTCCACAGACTGGAAGAGTCCTTCCTGGTGGA
AGAGGATAAGAAGCACGAGCGGCACCCCATCTTCGGCAACATCGTGGACGAGGTGG
CCTACCACGAGAAGTACCCCACCATCTACCACCTGAGAAAGAAACTGGTGGACAGC
ACCGACAAGGCCGACCTGCGGCTGATCTATCTGGCCCTGGCCCACATGATCAAGTTC
CGGGGCCACTTCCTGATCGAGGGCGACCTGAACCCCGACAACAGCGACGTGGACAA
GCTGTTCATCCAGCTGGTGCAGACCTACAACCAGCTGTTCGAGGAAAACCCCATCAA
CGCCAGCGGCGTGGACGCCAAGGCCATCCTGTCTGCCAGACTGAGCAAGAGCAGAC
GGCTGGAAAATCTGATCGCCCAGCTGCCCGGCGAGAAGAAGAATGGCCTGTTCGGC
ACCTGATTGCCCTGAGCCTGGGCCTGACCCCCAACTTCAAGAGCAACTTCGACCTG
GCCGAGGATGCCAAACTGCAGCTGAGCAAGGACACCTACGACGACGACCTGGACAA
CCTGCTGGCCCAGATCGGCGACCAGTACGCCGACCTGTTTCTGGCCGCCAAGAACCT
GTCCGACGCCATCCTGCTGAGCGACATCCTGAGAGTGAACACCGAGATCACCAAGG
CCCCCCTGAGCGCCTCTATGACAAGAGATACGACGAGCACCACCAGGACCTGACC
CTGCTGAAAGCTCTCGTGCGGCAGCAGCTGCCTGAGAAGTACAAAGAGATTTTCTTC
GACCAGAGCAAGAACGGCTACGCCGGCTACATTGACGGCGGAGCCAGCCAGGAAG
AGTTCTACAAGTTCATCAAGCCCATCCTGGAAAAGATGGACGGCACCGAGGAACTG
CTCGTGAAGCTGAACAGAGAGGACCTGCTGCGGAAGCAGCGGACCTTCGACAACGG
CAGCATCCCCCACCAGATCCACCTGGGAGAGCTGCACGCCATTCTGCGGCGGCAGG
AAGATTTTTACCCATTCCTGAAGGACAACCGGGAAAAGATCGAGAAGATCCTGACC
TTCCGCATCCCCTACTACGTGGGCCCTCTGGCCAGGGGAAACAGCAGATTCGCCTGG
ATGACCAGAAAGAGCGAGGAAACCATCACCCCCTGGAACTTCGAGGAAGTGGTGGA
CAAGGGCGCTTCCGCCCAGAGCTTCATCGAGCGGATGACCAACTTCGATAAGAACC
TGCCCAACGAGAAGGTGCTGCCCAAGCACAGCCTGCTGTACGAGTACTTCACCGTGT
ATAACGAGCTGACCAAAGTGAAATACGTGACCGAGGGAATGAGAAAGCCCGCCTTC
CTGAGCGGCGAGCAGAAAAAGGCCATCGTGGACCTGCTGTTCAAGACCAACCGGAA
AGTGACCGTGAAGCAGCTGAAAGAGGACTACTTCAAGAAAATCGAGTGCTTCGACT
CCGTGGAAATCTCCGGCGTGGAAGATCGGTTCAACGCCTCCCTGGGCACATACCAC
GATCTGCTGAAAATTATCAAGGACAAGGACTTCCTGGACAATGAGGAAAACGAGGA
CATTCTGGAAGATATCGTGCTGACCCTGACACTGTTTGAGGACAGAGAGATGATCGA
GGAACGGCTGAAAACCTATGCCCACCTGTTCGACGACAAAGTGATGAAGCAGCTGA
AGCGGCGGAGATACACCGGCTGGGGCAGGCTGAGCCGGAAGCTGATCAACGGCATC
CGGGACAAGCAGTCCGGCAAGACAATCCTGGATTTCCTGAAGTCCGACGGCTTCGC
CAACAGAAACTTCATGCAGCTGATCCACGACGACAGCCTGACCTTTAAAGAGGACA
TCCAGAAAGCCCAGGTGTCCGGCCAGGGCGATAGCCTGCACGAGCACATTGCCAAT
CTGGCCGGCAGCCCCGCCATTAAGAAGGGCATCCTGCAGACAGTGAAGGTGGTGGA
CGAGCTCGTGAAAGTGATGGGCCGGCACAAGCCCGAGAACATCGTGATCGAAATGG
CCAGAGAGAACCAGACCACCCAGAAGGGACAGAAGAACAGCCGCGAGAGAATGAA
GCGGATCGAAGAGGGCATCAAAGAGCTGGGCAGCCAGATCCTGAAAGAACACCCC
GTGGAAAACACCCAGCTGCAGAACGAGAAGCTGTACCTGTACTACCTGCAGAATGG
GCGGGATATGTACGTGGACCAGGAACTGGACATCAACCGGCTGTCCGACTACGATG
TGGACCATATCGTGCCTCAGAGCTTTCTGAAGGACGACTCCATCGACAACAAGGTGC
TGACCAGAAGCGACAAGAACCGGGGCAAGAGCGACAACGTGCCCTCCGAAGAGGT
CGTGAAGAAGATGAAGAACTACTGGCGGCAGCTGCTGAACGCCAAGCTGATTACCC
AGAGAAAGTTCGACAATCTGACCAAGGCCGAGAGAGGCGGCCTGAGCGAACTGGAT
AAGGCCGGCTTCATCAAGAGACAGCTGGTGGAAACCCGGCAGATCACAAAGCACGT
GGCACAGATCCTGGACTCCCGGATGAACACTAAGTACGACGAGAATGACAAGCTGA
TCCGGGAAGTGAAAGTGATCACCCTGAAGTCCAAGCTGGTGTCCGATTTCCGGAAG
GATTTCCAGTTTTACAAAGTGCGCGAGATCAACAACTACCACCACGCCCACGACGCC
TACCTGAACGCCGTCGTGGGAACCGCCCTGATCAAAAAGTACCCTAAGCTGGAAAG
CGAGTTCGTGTACGGCGACTACAAGGTGTACGACGTGCGGAAGATGATCGCCAAGA
GCGAGCAGGAAATCGGCAAGGCTACCGCCAAGTACTTCTTCTACAGCAACATCATG
AACTTTTTCAAGACCGAGATTACCCTGGCCAACGGCGAGATCCGGAAGCGGCCTCT
GATCGAGACAAACGGCGAAACCGGGGAGATCGTGTGGGATAAGGGCCGGGATTTTG
CCACCGTGCGGAAAGTGCTGAGCATGCCCCAAGTGAATATCGTGAAAAAGACCGAG
GTGCAGACAGGCGGCTTCAGCAAAGAGTCTATCCTGCCCAAGAGGAACAGCGATAA
GCTGATCGCCAGAAAGAAGGACTGGGACCCTAAGAAGTACGGCGGCTTCGACAGCC
CCACCGTGGCCTATTCTGTGCTGGTGGTGGCCAAAGTGGAAAAGGGCAAGTCCAAG
AAACTGAAGAGTGTGAAAGAGCTGCTGGGGATCACCATCATGGAAAGAAGCAGCTT
CGAGAAGAATCCCATCGACTTTCTGGAAGCCAAGGGCTACAAAGAAGTGAAAAAGG
ACCTGATCATCAAGCTGCCTAAGTACTCCCTGTTCGAGCTGGAAAACGGCCGGAAG
AGAATGCTGGCCTCTGCCGGCGAACTGCAGAAGGGAAACGAACTGGCCCTGCCCTC
CAAATATGTGAACTTCCTGTACCTGGCCAGCCACTATGAGAAGCTGAAGGGCTCCCC
CGAGGATAATGAGCAGAAACAGCTGTTTGTGGAACAGCACAAGCACTACCTGGACG
AGATCATCGAGCAGATCAGCGAGTTCTCCAAGAGAGTGATCCTGGCCGACGCTAAT
CTGGACAAAGTGCTGTCCGCCTACAACAAGCACCGGGATAAGCCCATCAGAGAGCA
GGCCGAGAATATCATCCACCTGTTTACCCTGACCAATCTGGGAGCCCCTGCCGCCTT
CAAGTACTTTGACACCACCATCGACCGGAAGAGGTACACCAGCACCAAAGAGGTGC
TGGACGCCACCCTGATCCACCAGAGCATCACCGGCCTGTACGAGACACGGATCGAC
CTGTCTCAGCTGGGAGGCGACAAGCGTCCTGCTGCTACTAAGAAAGCTGGTCAAGCT
AAGAAAAAGAAA
> hEMX1-HRTemplate-HindIII-NheI
(SEQ ID NO: 81)
GAATGCTGCCCTCAGACCCGCTTCCTCCCTGTCCTTGTCTGTCCAAGGAGA
ATGAGGTCTCACTGGTGGATTTCGGACTACCCTGAGGAGCTGGCACCTGAGGGACA
AGGCCCCCCACCTGCCCAGCTCCAGCCTCTGATGAGGGGTGGGAGAGAGCTACATG
AGGTTGCTAAGAAAGCCTCCCCTGAAGGAGACCACACAGTGTGTGAGGTTGGAGTC
TCTAGCAGCGGGTTCTGTGCCCCCAGGGATAGTCTGGCTGTCCAGGCACTGCTCTTG
ATATAAACACCACCTCCTAGTTATGAAACCATGCCCATTCTGCCTCTCTGTATGGAA
AAGAGCATGGGGCTGGCCCGTGGGGTGGTGTCCACTTTAGGCCCTGTGGGAGATCA
TGGGAACCCACGCAGTGGGTCATAGGCTCTCTCATTTACTACTCACATCCACTCTGT
GAAGAAGCGATTATGATCTCTCCTCTAGAAACTCGTAGAGTCCCATGTCTGCCGGCT
TCCAGAGCCTGCACTCCTCCACCTTGGCTTGGCTTTGCTGGGGCTAGAGGAGCTAGG
ATGCACAGCAGCTCTGTGACCCTTTGTTTGAGAGGAACAGGAAAACCACCCTTCTCT
CTGGCCCACTGTGTCCTCTTCCTGCCCTGCCATCCCCTTCTGTGAATGTTAGACCCAT
GGGAGCAGCTGGTCAGAGGGGACCCCGGCCTGGGGCCCCTAACCCTATGTAGCCTC
AGTCTTCCCATCAGGCTCTCAGCTCAGCCTGAGTGTTGAGGCCCCAGTGGCTGCTCT
GGGGGCCTCCTGAGTTTCTCATCTGTGCCCCTCCCTCCCTGGCCCAGGTGAAGGTGT
GGTTCCAGAACCGGAGGACAAAGTACAAACGGCAGAAGCTGGAGGAGGAAGGGCC
TGAGTCCGAGCAGAAGAAGAGGGCTCCCATCACATCAACCGGTGGCGCATTGCCA
CGAAGCAGGCCAATGGGGAGGACATCGATGTCACCTCCAATGACaagcttgctagcGGTGG
GCAACCACAAACCCACGAGGGCAGAGTGCTGCTTGCTGCTGGCCAGGCCCCTGCGT
GGGCCCAAGCTGGACTCTGGCCACTCCCTGGCCAGGCTTTGGGGAGGCCTGGAGTC
ATGGCCCCACAGGGCTTGAAGCCCGGGGCCGCCATTGACAGAGGGACAAGCAATGG
GCTGGCTGAGGCCTGGGACCACTTGGCCTTCTCCTCGGAGAGCCTGCCTGCCTGGGC
GGGCCCGCCCGCCACCGCAGCCTCCCAGCTGCTCTCCGTGTCTCCAATCTCCCTTTTG
TTTTGATGCATTTCTGTTTTAATTTATTTTCCAGGCACCACTGTAGTTTAGTGATCCCC
AGTGTCCCCCTTCCCTATGGGAATAATAAAAGTCTCTCTCTTAATGACACGGGCATC
CAGCTCCAGCCCCAGAGCCTGGGGTGGTAGATTCCGGCTCTGAGGGCCAGTGGGGG
CTGGTAGAGCAAACGCGTTCAGGGCCTGGGAGCCTGGGGTGGGGTACTGGTGGAGG
GGGTCAAGGGTAATTCATTAACTCCTCTCTTTTGTTGGGGGACCCTGGTCTCTACCTC
CAGCTCCACAGCAGGAGAAACAGGCTAGACATAGGGAAGGGCCATCCTGTATCTTG
AGGGAGGACAGGCCCAGGTCTTTCTTAACGTATTGAGAGGTGGGAATCAGGCCCAG
GTAGTTCAATGGGAGAGGGAGAGTGCTTCCCTCTGCCTAGAGACTCTGGTGGCTTCT
CCAGTTGAGGAGAAACCAGAGGAAAGGGGAGGATTGGGGTCTGGGGGAGGGAACA
CCATTCACAAAGGCTGACGGTTCCAGTCCGAAGTCGTGGGCCCACCAGGATGCTCA
CCTGTCCTTGGAGAACCGCTGGGCAGGTTGAGACTGCAGAGACAGGGCTTAAGGCT
GAGCCTGCAACCAGTCCCCAGTGACTCAGGGCCTCCTCAGCCCAAGAAAGAGCAAC
GTGCCAGGGCCCGCTGAGCTCTTGTGTTCACCTG
> NLS-StCsn1-NLS
(SEQ ID NO: 82)
ATGAAAAGGCCGGCGGCCACGAAAAAGGCCGGCCAGGCAAAAAAGAAA
AAGTCCGACCTGGTACTTGGACTGGATATTGGTATCGGTTCGGTGGGAGTCGGAATC
CTCAACAAGGTCACGGGGGAGATCATTCACAAGAACTCGCGGATCTTCCCCGCAGC
TCAGGCTGAGAACAACTTGGTGCGGAGAACG
AATAGGCAGGGCAGGCGACTGGCGAGGAGGAAGAAACACAGGAGAGTC
CGATTGAACCGGCTGTTCGAGGAGTCCGGTTTGATCACCGACTTTACGAAAATCTCG
ATTAACCTTAATCCCTATCAGCTTCGGGTGAAAGGCCTGACAGACGAACTTTCGAAT
GAGGAACTTTTCATCGCGCTGAAAAACATGGTCAAGCACAGAGGGATTTCCTACCTC
GATGACGCCTCGGATGACGGAAATTCCTCAGTAGGAGATTATGCACAGATCGTGAA
AGAGAACTCAAAGCAACTGGAAACAAAGACACCGGGGCAGATCCAACTTGAAAGA
TACCAGACATACGGACAGCTCAGAGGAGATTTTACGGTGGAGAAGGACGGTAAAAA
GCACAGACTCATTAACGTATTTCCCACGTCGGCGTACAGATCCGAAGCGCTCCGCAT
CCTTCAGACTCAACAGGAGTTCAACCCGCAAATTACTGATGAGTTCATCAACCGCTA
TTTGGAAATCTTGACCGGAAAGCGCAAGTATTATCATGGGCCGGGTAATGAGAAAT
CCAGAACAGATTACGGCCGATACAGAACTTCGGGGGAAACCTTGGATAACATCTTT
GGTATTTTGATTGGAAAGTGCACCTTTTACCCGGACGAGTTTCGAGCGGCCAAGGCG
TCATACACAGCACAAGAGTTTAATCTCTTGAATGATTTGAACAACTTGACGGTCCCC
ACGGAGACAAAGAAGCTCTCCAAAGAGCAAAAGAACCAAATCATCAACTACGTCA
AGAACGAGAAGGCTATGGGGCCAGCGAAGCTGTTCAAGTATATCGCTAAACTTCTC
AGCTGTGATGTGGCGGACATCAAAGGGTACCGAATCGACAAGTCGGGAAAAGCGGA
AATTCACACGTTTGAAGCATATCGAAAGATGAAAACGTTGGAAACACTGGACATTG
AGCAGATGGACCGGGAAACGCTCGACAAACTGGCATACGTGCTCACGTTGAATACT
GAACGAGAGGGAATCCAAGAGGCCCTTGAACATGAGTTCGCCGATGGATCGTTCAG
CCAGAAGCAGGTCGACGAACTTGTGCAATTCCGCAAGGCGAATAGCTCCATCTTCG
GGAAGGGATGGCACAACTTTTCGGTCAAACTCATGATGGAGTTGATCCCAGAACTTT
ATGAGACTTCGGAGGAGCAAATGACGATCTTGACGCGCTTGGGGAAACAGAAAACG
ACAAGCTCATCGAACAAAACTAAGTACATTGATGAGAAATTGCTGACGGAAGAAAT
CTATAATCCGGTAGTAGCGAAATCGGTAAGACAAGCGATCAAAATCGTGAACGCGG
CGATCAAGGAATATGGTGACTTTGATAACATCGTAATTGAAATGGCTAGAGAGACG
AACGAAGATGACGAGAAAAAGGCAATCCAGAAGATCCAGAAGGCCAACAAGGATG
AAAAAGATGCAGCGATGCTTAAAGCGGCCAACCAATACAATGGAAAGGCGGAGCT
GCCCCATTCAGTGTTTCACGGTCATAAACAGTTGGCGACCAAGATCCGACTCTGGCA
TCAGCAGGGTGAGCGGTGTCTCTACACCGGAAAGACTATCTCCATCCATGACTTGAT
TAACAATTCGAACCAGTTTGAAGTGGATCATATTCTGCCCCTGTCAATCACCTTTGA
CGACTCGCTTGCGAACAAGGTGCTCGTGTACGCAACGGCAAATCAGGAGAAAGGCC
AGCGGACTCCGTATCAGGCGCTCGACTCAATGGACGATGCGTGGTCATTCCGGGAG
CTGAAGGCGTTCGTACGCGAGAGCAAGACACTGAGCAACAAAAAGAAAGAGTATCT
GCTGACAGAGGAGGACATCTCGAAATTCGATGTCAGGAAGAAGTTCATCGAGCGGA
ATCTTGTCGACACTCGCTACGCTTCCAGAGTAGTACTGAACGCGCTCCAGGAACACT
TTAGAGCGCACAAAATTGACACGAAGGTGTCAGTGGTGAGAGGGCAGTTCACATCC
CAACTCCGCCGACATTGGGGCATCGAAAAGACGCGGGACACATATCACCATCATGC
GGTGGACGCGCTGATTATTGCCGCTTCGTCCCAGTTGAATCTCTGGAAAAAGCAGAA
GAACACGCTGGTGTCGTATTCGGAGGATCAGCTTTTGGACATCGAAACCGGGGAGC
TGATTTCCGACGATGAATACAAAGAATCGGTGTTTAAGGCACCATATCAGCATTTCG
TGGACACGCTGAAGAGCAAAGAGTTTGAGGACAGCATCCTCTTTTCGTACCAAGTG
GACTCGAAGTTTAATCGCAAGATTTCAGACGCCACAATCTACGCGACGAGGCAGGC
GAAGGTGGGCAAAGATAAAGCAGATGAAACCTACGTCCTTGGTAAAATCAAGGACA
TCTACACTCAGGACGGGTACGATGCGTTCATGAAAATCTACAAGAAGGATAAGTCG
AAGTTTCTCATGTACCGCCACGATCCACAGACTTTCGAAAAAGTCATTGAGCCTATT
TTGGAGAACTACCCTAACAAGCAAATCAACGAGAAAGGGAAAGAAGTCCCGTGCAA
CCCCTTTCTGAAGTACAAGGAAGAGCACGGTTATATCCGCAAATACTCGAAGAAAG
GAAATGGGCCTGAGATTAAGTCGCTTAAGTATTACGACTCAAAGTTGGGTAACCAC
ATCGACATTACCCCGAAAGACTCCAACAACAAAGTCGTGTTGCAGTCCGTCTCGCCC
TGGCGAGCAGATGTGTATTTTAATAAGACGACCGGCAAATATGAGATCCTTGGACTC
AAATACGCAGACCTTCAATTCGAAAAGGGGACGGGCACTTATAAGATTTCACAAGA
GAAGTACAACGACATCAAGAAAAAGGAAGGGGTCGATTCAGATTCGGAGTTCAAAT
TCACCCTCTACAAAAACGACCTCCTGCTTGTGAAGGACACAGAAACGAAGGAGCAG
CAGCTCTTTCGGTTCCTCTCACGCACGATGCCCAAACAAAAACATTACGTCGAACTT
AAACCTTACGATAAGCAAAAGTTTGAAGGGGGAGAGGCACTGATCAAAGTATTGGG
TAACGTAGCCAATAGCGGACAGTGTAAGAAAGGGCTGGGAAAGTCCAATATCTCGA
TCTATAAAGTACGAACAGATGTATTGGGAAACCAGCATATCATCAAAAATGAGGGG
GATAAACCCAAACTCGATTTCAAGCGTCCTGCTGCTACTAAGAAAGCTGGTCAAGCT
AAGAAAAAGAAATAA
> U6-St_tracrRNA(7-97)
(SEQ ID NO: 83)
GAGGGCCTATTTCCCATGATTCCTTCATATTTGCATATACGATACAAGGCT
GTTAGAGAGATAATTGGAATTAATTTGACTGTAAACACAAAGATATTAGTACAAAA
TACGTGACGTAGAAAGTAATAATTTCTTGGGTAGTTTGCAGTTTTAAAATTATGTTTT
AAAATGGACTATCATATGCTTACCGTAACTTGAAAGTATTTCGATTTCTTGGCTTTAT
ATATCTTGTGGAAAGGACGAAACACCGTTACTTAAATCTTGCAGAAGCTACAAAGA
TAAGGCTTCATGCCGAAATCAACACCCTGTCATTTTATGGCAGGGTGTTTTCGTTATT
TAA
>EMX1_TALEN_Left
(SEQ ID NO: 84)
ATGGACTATAAGGACCACGACGGAGACTACAAGGATCATGATATTGATTA
CAAAGACGATGACGATAAGATGGCCCCAAAGAAGAAGCGGAAGGTCGGTATCCAC
GGAGTCCCAGCAGCCGTAGATTTGAGAACTTTGGGATATTCACAGCAGCAGCAGGA
AAAGATCAAGCCCAAAGTGAGGTCGACAGTCGCGCAGCATCACGAAGCGCTGGTGG
GTCATGGGTTTACACATGCCCACATCGTAGCCTTGTCGCAGCACCCTGCAGCCCTTG
GCACGGTCGCCGTCAAGTACCAGGACATGATTGCGGCGTTGCCGGAAGCCACACAT
GAGGCGATCGTCGGTGTGGGGAAACAGTGGAGCGGAGCCCGAGCGCTTGAGGCCCT
GTTGACGGTCGCGGGAGAGCTGAGAGGGCCTCCCCTTCAGCTGGACACGGGCCAGT
TGCTGAAGATCGCGAAGCGGGGAGGAGTCACGGCGGTCGAGGCGGTGCACGCGTGG
CGCAATGCGCTCACGGGAGCACCCCTCAACCTGACCCCAGAGCAGGTCGTGGCAAT
TGCGAGCAACCACGGGGGAAAGCAGGCACTCGAAACCGTCCAGAGGTTGCTGCCTG
TGCTGTGCCAAGCGCACGGACTTACGCCAGAGCAGGTCGTGGCAATTGCGAGCAAC
CACGGGGGAAAGCAGGCACTCGAAACCGTCCAGAGGTTGCTGCCTGTGCTGTGCCA
AGCGCACGGACTAACCCCAGAGCAGGTCGTGGCAATTGCGAGCAACATCGGGGGAA
AGCAGGCACTCGAAACCGTCCAGAGGTTGCTGCCTGTGCTGTGCCAAGCGCACGGG
TTGACCCCAGAGCAGGTCGTGGCAATTGCGAGCAACCACGGGGGAAAGCAGGCACT
CGAAACCGTCCAGAGGTTGCTGCCTGTGCTGTGCCAAGCGCACGGCCTGACCCCAG
AGCAGGTCGTGGCAATTGCGAGCAACCACGGGGGAAAGCAGGCACTCGAAACCGTC
CAGAGGTTGCTGCCTGTGCTGTGCCAAGCGCACGGACTGACACCAGAGACAGGTCGT
GGCAATTGCGAGCAACATCGGGGGAAAGCAGGCACTCGAAACCGTCCAGAGGTTGC
TGCCTGTGCTGTGCCAAGCGCACGGACTTACACCCGAACAAGTCGTGGCAATTGCG
AGCAACCACGGGGGAAAGCAGGCACTCGAAACCGTCCAGAGGTTGCTGCCTGTGCT
GTGCCAAGCGCACGGACTTACGCCAGAGCAGGTCGTGGCAATTGCGAGCAACCACG
GGGGAAAGCAGGCACTCGAAACCGTCCAGAGGTTGCTGCCTGTGCTGTGCCAAGCG
CACGGACTAACCCCAGAGCAGGTCGTGGCAATTGCGAGCAACATCGGGGGAAAGCA
GGCACTCGAAACCGTCCAGAGGTTGCTGCCTGTGCTGTGCCAAGCGCACGGGTTGA
CCCCAGAGCAGGTCGTGGCAATTGCGAGCAACATCGGGGGAAAGCAGGCACTCGAA
ACCGTCCAGAGGTTGCTGCCTGTGCTGTGCCAAGCGCACGGCCTGACCCCAGAGCA
GGTCGTGGCAATTGCGAGCAACCACGGGGGAAAGCAGGCACTCGAAACCGTCCAGA
GGTTGCTGCCTGTGCTGTGCCAAGCGCACGGACTGACACCAGAGCAGGTCGTGGCA
ATTGCGAGCAACCACGGGGGAAAGCAGGCACTCGAAACCGTCCAGAGGTTGCTGCC
TGTGCTGTGCCAAGCGCACGGACTCACGCCTGAGCAGGTAGTGGCTATTGCATCCAA
CAACGGGGGCAGACCCGCACTGGAGTCAATCGTGGCCCAGCTTTCGAGGCCGGACC
CCGCGCTGGCCGCACTCACTAATGATCATCTTGTAGCGCTGGCCTGCCTCGGCGGAC
GACCCGCCTTGGATGCGGTGAAGAAGGGGCTCCCGCACGCGCCTGCATTGATTAAG
CGGACCAACAGAAGGATTCCCGAGAGGACATCACATCGAGTGGCAGGTTCCCAACT
CGTGAAGAGTGAACTTGAGGAGAAAAAGTCGGAGCTGCGGCACAAATTGAAATACG
TACCGCATGAATACATCGAACTTATCGAAATTGCTAGGAACTCGACTCAAGACAGA
ATCCTTGAGATGAAGGTAATGGAGTTCTTTATGAAGGTTTATGGATACCGAGGGAAG
CATCTCGGTGGATCACGAAAACCCGACGGAGCAATCTATAGGTGGGGAGCCCGAT
TGATTACGGAGTGATCGTCGACACGAAAGCCTACAGCGGTGGGTACAATCTTCCCAT
CGGGCAGGCAGATGAGATGCAACGTTATGTCGAAGAAAATCAGACCAGGAACAAA
CACATCAATCCAAATGAGTGGTGGAAAGTGTATCCTTCATCAGTGACCGAGTTTAAG
TTTTTGTTTGTCTCTGGGCATTTCAAAGGCAACTATAAGGCCCAGCTCACACGGTTG
AATCACATTACGAACTGCAATGGTGCGGTTTTGTCCGTAGAGGAACTGCTCATTGGT
GGAGAAATGATCAAAGCGGGAACTGTGACACTGGAAGAAGTCAGACGCAAGTTTAA
CAATGGCGAGATCAATTTCCGCTCA
>EMX1_TALEN_Right
(SEQ ID NO: 85)
ATGGACTATAAGGACCACGACGGAGACTACAAGGATCATGATATTGATTA
CAAAGACGATGACGATAAGATGGCCCCAAAGAAGAAGCGGAAGGTCGGTATCCAC
GGAGTCCCAGCAGCCGTAGATTTGAGAACTTTGGGATATTCACAGCAGCAGCAGGA
AAAGATCAAGCCCAAAGTGAGGTCGACAGTCGCGCAGCATCACGAAGCGCTGGTGG
GTCATGGGTTTACACATGCCCACATCGTAGCCTTGTCGCAGCACCCTGCAGCCCTTG
GCACGGTCGCCGTCAAGTACCAGGACATGATTGCGGCGTTGCCGGAAGCCACACAT
GAGGCGATCGTCGGTGTGGGGAAACAGTGGAGCGGAGCCCGAGCGCTTGAGGCCCT
GTTGACGGTCGCGGGAGAGCTGAGAGGGCCTCCCCTTCAGCTGGACACGGGCCAGT
TGCTGAAGATCGCGAAGCGGGGAGGAGTCACGGCGGTCGAGGCGGTGCACGCGTGG
CGCAATGCGCTCACGGGAGCACCCCTCAACCTGACCCCAGAGCAGGTCGTGGCAAT
TGCGAGCAACCACGGGGGAAAGCAGGCACTCGAAACCGTCCAGAGGTTGCTGCCTG
TGCTGTGCCAAGCGCACGGACTTACGCCAGAGCAGGTCGTGGCAATTGCGAGCAAC
CACGGGGGAAAGCAGGCACTCGAAACCGTCCAGAGGTTGCTGCCTGTGCTGTGCCA
AGCGCACGGACTAACCCCAGAGCAGGTCGTGGCAATTGCGAGCAACCACGGGGGA
AAGCAGGCACTCGAAACCGTCCAGAGGTTGCTGCCTGTGCTGTGCCAAGCGCACGG
GTTGACCCCAGAGCAGGTCGTGGCAATTGCGAGCAACATCGGGGGAAAGCAGGCAC
TCGAAACCGTCCAGAGGTTGCTGCCTGTGCTGTGCCAAGCGCACGGCCTGACCCCAG
AGCAGGTCGTGGCAATTGCGAGCAACCACGGGGGAAAGCAGGCACTCGAAACCGTC
CAGAGGTTGCTGCCTGTGCTGTGCCAAGCGCACGGACTGACACCAGAGCAGGTCGT
GGCAATTGCGAGCCATGACGGGGGAAAGCAGGCACTCGAAACCGTCCAGAGGTTGC
TGCCTGTGCTGTGCCAAGCGCACGGACTTACACCCGAACAAGTCGTGGCAATTGCG
AGCCATGACGGGGGAAAGCAGGCACTCGAAACCGTCCAGAGGTTGCTGCCTGTGCT
GTGCCAAGCGCACGGACTTACGCCAGAGCAGGTCGTGGCAATTGCGAGCCATGACG
GGGGAAAGCAGGCACTCGAAACCGTCCAGAGGTTGCTGCCTGTGCTGTGCCAAGCG
CACGGACTAACCCCAGAGCAGGTCGTGGCAATTGCGAGCAACGGAGGGGGAAAGC
AGGCACTCGAAACCGTCCAGAGGTTGCTGCCTGTGCTGTGCCAAGCGCACGGGTTG
ACCCCAGAGCAGGTCGTGGCAATTGCGAGCAACGGAGGGGGAAAGCAGGCACTCG
AAACCGTCCAGAGGTTGCTGCCTGTGCTGTGCCAAGCGCACGGCCTGACCCCAGAG
CAGGTCGTGGCAATTGCGAGCCATGACGGGGGAAAGCAGGCACTCGAAACCGTCCA
GAGGTTGCTGCCTGTGCTGTGCCAAGCGCACGGACTGACACCAGAGCAGGTCGTGG
CAATTGCGAGCAACGGAGGGGGAAAGCAGGCACTCGAAACCGTCCAGAGGTTGCTG
CCTGTGCTGTGCCAAGCGCACGGACTCACGCCTGAGCAGGTAGTGGCTATTGCATCC
AACGGAGGGGGCAGACCCGCACTGGAGTCAATCGTGGCCCAGCTTTCGAGGCCGGA
CCCCGCGCTGGCCGCACTCACTAATGATCATCTTGTAGCGCTGGCCTGCCTCGGCGG
ACGACCCGCCTTGGATGCGGTGAAGAAGGGGCTCCCGCACGCGCCTGCATTGATTA
AGCGGACCAACAGAAGGATTCCCGAGAGGAATCACATCGAGTGGCAGGTTCCCAAC
TCGTGAAGAGTGAACTTGAGGAGAAAAAGTCGGAGCTGCGGCACAAATTGAAATAC
GTACCGCATGAATACATCGAACTTATCGAAATTGCTAGGAACTCGACTCAAGACAG
AATCCTTGAGATGAAGGTAATGGAGTTCTTTATGAAGGTTTATGGATACCGAGGGAA
GCATCTCGGTGGATCACGAAAACCCGACGGAGCAATCTATACGGTGGGGAGCCCGA
TTGATTACGGAGTGATCGTCGACACGAAAGCCTACAGCGGTGGGTACAATCTTCCCA
TCGGGCAGGCAGATGAGATGCAACGTTATGTCGAAGAAAATCAGACCAGGAACAAA
CACATCAATCCAAATGAGTGGTGGAAAGTGTATCCTTCATCAGTGACCGAGTTTAAG
TTTTTGTTTGTCTCTGGGCATTTCAAAGGCAACTATAAGGCCCAGCTCACACGGTTG
AATCACATTACGAACTGCAATGGTGCGGTTTTGTCCGTAGAGGAACTGCTCATTGGT
GGAGAAATGATCAAAGCGGGAACTCTGACACTGGAAGAAGTCAGACGCAAGTTTAA
CAATGGCGAGATCAATTTCCGCTCA

### Example 9

### Cloning (Construction) of AAV Constructs

[0461] Construction of AAV-Promoter-TALE-Effector Backbone.

[0462] For construction of AAV-promoter-TALE-effector a backbone was cloned by standard subcloning methods. Specifically, the vector contained an antibiotics resistance gene, such as ampicillin resistance and two AAV inverted terminal repeats (itr's) flanking the promoter-TALE-effector insert (sequences, see below). The promoter (hSyn), the effector domain (VP64. SID4X or CIB1 in this example)/the N- and C-terminal portion of the TALE gene containing a spacer with two typeIIS restriction sites (BsaI in this instance) were subcloned into this vector. To achieve subcloning, each DNA component was amplified using polymerase-chain reaction and then digested with specific restriction enzymes to create matching DNA sticky ends. The vector was similarly digested with DNA restriction enzymes. All DNA fragments were subsequently allowed to anneal at matching ends and fused together using a ligase enzyme.

[0463] Assembly of Individual TALEs into AAV-Promoter-TALE-Effector Backbone.

[0464] For incorporating different TALE monomer sequences into the AAV-promoter-TALE-effector backbone described above, a strategy based on restriction of individual monomers with type IIS restriction enzymes and ligation of their unique overhangs to form an assembly of 12 to 16 monomers to form the final TALE and ligate it into the AAV-promoter-TALE-effector backbone by using the type IIS sites present in the spacer between the N- and C-term (termed golden gate assembly). This method of TALE monomer assembly has previously been described by us (NE Sanjana, L Cong, Y Zhou, M M Cunniff. G Feng & F Zhang A transcription activator-like effector toolbox for genome engineering Nature Protocols 7, 171-192 (2012) doi: 10.1038/nprot.2011.431)

[0465] By using the general cloning strategy outlined above, AAV vectors containing different promoters, effector domains and TALE monomer sequences can be easily constructed.

[0466] Nucleotide Sequences:

Left AAV ITR

(SEQ ID NO: 86)

cctgcaggcagctgcgcgctcgctcgctcactgaggccgcccgggcaaag
cccgggcgtcgggcgacctttggtcgcccggcctcagtgagcgagcgagc
gcgcagagagggagtggccaactccatcactaggggttcct
Right AAV ITR

(SEQ ID NO: 87)

Aggaacccctagtgatggagttggccactccctctctgcgcgctcgctcg
ctcactgaggccgggcgaccaaaggtcgcccgacgcccgggctttgcccg
ggcggcctcagtgagcgagcgagcgcgcagctgcctgcagg
hSyn promoter

(SEQ ID NO: 88)

gtgtctagactgcagagggccctgcgtatgagtgcaagtgggttttagga
ccaggatgaggcggggtgggggtgcctacctgacgaccgaccccgaccca
ctggacaagcacccaacccccattccccaaattgcgcatcccctatcaga
gagggggaggggaaacaggatgcggcgaggcgcgtgcgcactgccagctt
cagcaccgcggacagtgccttcgcccccgcctggcggcgcgcgccaccgc
cgcctcagcactgaaggcgcgctgacgtcactcgccggtcccccgcaaac
tccccttcccggccaccttggtcgcgtccgcgccgccgccggcccagccg
gaccgcaccacgcgaggcgcgagataggggggcacgggcgcgaccatctg
cgctgcggcgccggcgactcagcgctgcctcagtctgcggtgggcagcgg
aggagtcgtgtcgtgcctgagagcgcagtcgagaa
TALE N-term (+136 AA truncation)

(SEQ ID NO: 89)

GTAGATTTGAGAACTTTGGGATATTCACAGCAGCAGCAGGAAAAGATCAA
GCCCAAAGTGAGGTCGACAGTCGCGCAGCATCACGAAGCGCTGGTGGGTC
ATGGGTTTACACATGCCCACATCGTAGCCTTGTCGCAGCACCCTGCAGCC
CTTGGCACGGTCGCCGTCAAGTACCAGGACATGATTGCGGCGTTGCCGGA
AGCCACACATGAGGCGATCGTCGGTGTGGGGAAACAGTGGAGCGGAGCCC
GAGCGCTTGAGGCCCTGTTGACGGTCGCGGGAGAGCTGAGAGGGCCTCCC
CTTCAGCTGGACACGGGCCAGTTGCTGAAGATCGCGAAGCGGGGAGGAGT
CACGGCGGTCGAGGCGGTGCACGCGTGGCGCAATGCGCTCACGGGAGCAC
CCCTCAAC
TALE C-term (+63 AA truncation)

(SEQ ID NO: 90)

CGGACCCCGCGCTGGCCGCACTCACTAATGATCATCTTGTAGCGCTGGCC
TGCCTCGGCGGACGACCCGCCTTGGATGCGGTGAAGAAGGGGCTCCCGCA
CGCGCCTGCATTGATTAAGCGGACCAACAGAAGGATTCCCGAGAGGACAT
CACATCGAGTGG
CA
Ampiciliin resistance gene

(SEQ ID NO: 91)

atgagtattcaacatttccgtgtcgcccttattcccttttttgcggcatt
ttgccttcctgtttttgctcacccagaaacgctggtgaaagtaaaagatg
ctgaagatcagttgggtgcacgagtgggttacatcgaactggatctcaac
agcggtaagatccttgagagttttcgccccgaagaacgttttccaatgat
gagcacttttaaagttctgctatgtggcgcggtattatcccgtattgacg
ccgggcaagagcaactcggtcgccgcatacactattctcagaatgacttg
gttgagtactcaccagtcacagaaaagcatcttacggatggcatgacagt
aagagaattatgcagtgctgccataaccatgagtgataacactgcggcca
acttacttctgacaacgatcggaggaccgaaggagctaaccgcttttttg
cacaacatgggggatcatgtaactcgccttgatcgttgggaaccggagct
gaatgaagccataccaaacgacgagcgtgacaccacgatgcctgtagcaa
tggcaacaacgttgcgcaaactattaactggcgaactacttactctagct
tcccggcaacaattaatagactggatggaggcggataaagttgcaggacc
acttctgcgctcggcccttccggctggctggtttattgctgataaatctg
gagccggtgagcgtgggtctcgcggtatcattgcagcactggggccagat
ggtaagccctcccgtatcgtagttatctacacgacggggagtcaggcaac
tatggatgaacgaaatagacagatcgctgagataggtgcctcactgatta
agcattgg

### Example 10

### Optical Control of Endogenous Mammalian Transcription

[0467] The ability to directly modulate transcription of the endogenous mammalian genome is critical for elucidating normal gene function and disease mechanisms. Here. Applicants describe the development of Light-Inducible Transcriptional Effectors (LITEs), a two-hybrid system integrating the customizable TALE DNA-binding domain with the light-sensitive cryptochrome 2 protein and its interacting partner CIB from Arabidopsis thaliana. LITEs can be activated within minutes, mediating reversible bidirectional regulation of endogenous mammalian gene expression as well as targeted epigenetic chromatin modifications. Applicants have applied this system in primary mouse neurons, as well as in the brain of awake, behaving mice in vivo. The LITE system establishes a novel mode of optogenetic control of endogenous cellular processes and enables direct testing of the causal roles of genetic and epigenetic regulation.

[0468] The dynamic nature of gene expression enables cellular programming, homeostasis, and environmental adaptation in living systems. Dissecting the contributions of genes to cellular and organismic function therefore requires an approach that enables spatially and temporally controlled modulation of gene expression. Microbial and plant-derived light-sensitive proteins have been engineered as optogenetic actuators, enabling the use of light—which provides high spatiotemporal resolution—to control many cellular functions (Deisseroth, K. Optogenetics. Nature methods 8, 26-29, doi:10.1038/nmeth.f.324 (2011); Zhang, F, et al. The microbial opsin family of optogenetic tools. Cell 147, 1446-1457, doi:10.1016/j.cell.2011.12.004 (2011); Levskaya, A., Weiner, O. D., Lim, W. A. & Voigt, C. A. Spatiotemporal control of cell signalling using a light-switchable protein interaction. Nature 461, 997-1001, doi:10.1038/nature08446 (2009); Yazawa, M., Sadaghiani, A. M., Hsueh, B. & Dolmetsch, R. E. Induction of protein-protein interactions in live cells using light. Nature biotechnology 27, 941-945, doi:10.1038/nbt.1569 (2009); Strickland. D, et al. TULIPs: tunable, light-controlled interacting protein tags for cell biology. Nature methods 9, 379-384, doi:10.1038/nmeth. 1904 (2012); Kennedy, M. J, et al. Rapid blue-light-mediated induction of protein interactions in living cells. Nature methods 7, 973-975, doi:10.1038/nmeth.1524 (2010); Shimizu-Sato, S., Huq, E., Tepperman, J. M. & Quail, P. H. A light-switchable gene promoter system. Nature biotechnology 20, 1041-1044, doi:10.1038/nbt734 (2002); Ye, H., Daoud-El Baba, M., Peng, R. W. & Fussenegger, M. A synthetic optogenetic transcription device enhances blood-glucose homeostasis in mice. Science 332, 1565-1568, doi:10.1126/science.1203535 (2011); Polstein, L. R. & Gersbach, C. A. Light-inducible spatiotemporal control of gene activation by customizable zinc finger transcription factors. Journal of the American Chemical Society 134, 16480-16483, doi:10.1021/ja3065667 (2012); Bugaj, L. J., Choksi, A. T., Mesuda, C. K., Kane, R. S. & Schaffer, D. V. Optogenetic protein clustering and signaling activation in mammalian cells. Nature methods (2013) and Zhang, F, et al. Multimodal fast optical interrogation of neural circuitry. Nature 446, 633-639, doi:10.1038/nature05744 (2007)). However, versatile and robust technologies to directly modulate endogenous transcriptional regulation using light remain elusive.

[0469] Here, Applicants report the development of Light-Inducible Transcriptional Effectors (LITEs), a modular optogenetic system that enables spatiotemporally precise control of endogenous genetic and epigenetic processes in mammalian cells. LITEs combine the programmable DNA-binding domain of transcription activator-like effectors (TALEs) (Boch, J, et al. Breaking the code of DNA binding specificity of TAL-type III effectors. Science 326, 1509-1512, doi:10.1126/science.1178811 (2009) and Moscou, M. J. & Bogdanove, A. J. A simple cipher governs DNA recognition by TAL effectors. Science 326, 1501, doi:10.1126/science.1178817 (2009)) from Xanthomonas sp, with the light-inducible heterodimeric proteins cryptochrome 2 (CRY2) and CIB1 from Arabidopsis thaliana (Kennedy, M. J, et al. Rapid blue-light-mediated induction of protein interactions in living cells. Nature methods 7, 973-975, doi:10.1038/nmeth.1524 (2010) and Liu, H, et al. Photoexcited CRY2 interacts with CIB1 to regulate transcription and floral initiation in Arabidopsis. Science 322, 1535-1539, doi:10.1126/science.1163927 (2008)). They do not require the introduction of heterologous genetic elements, do not depend on exogenous chemical co-factors, and exhibit fast and reversible dimerization kinetics (Levskaya, A., Weiner, O. D., Lim, W. A. & Voigt, C. A. Spatiotemporal control of cell signalling using a light-switchable protein interaction. Nature 461, 997-1001, doi:10.1038/nature08446 (2009); Yazawa, M., Sadaghiani, A. M., Hsueh, B. & Dolmetsch, R. E. Induction of protein-protein interactions in live cells using light. Nature biotechnology 27, 941-945, doi: 10.1038/nbt.1569 (2009). Kennedy, M. J, et al. Rapid blue-light-mediated induction of protein interactions in living cells. Nature methods 7, 973-975, doi:10.1038/nmeth.1524 (2010); Shimizu-Sato, S., Huq, E., Tepperman, J. M. & Quail, P. H. A light-switchable gene promoter system. Nature biotechnology 20, 1041-1044, doi:10.1038/nbt734 (2002) and Liu, H, et al. Photoexcited CRY2 interacts with CIB1 to regulate transcription and floral initiation in Arabidopsis. Science 322, 1535-1539, doi: 10.1126/science.1163927 (2008)). Like other optogenetic tools, LITEs can be packaged into viral vectors and genetically targeted to probe specific cell populations. Applicants demonstrate the application of this system in primary neurons as well as in the mouse brain in vivo.

[0470] The LITE system contains two independent components (FIG. 36A): The first component is the genomic anchor and consists of a customized TALE DNA-binding domain fused to the light-sensitive CRY2 protein (TALE-CRY2). The second component consists of CIB1 fused to the desired transcriptional effector domain (CIB1-effector). To ensure effective nuclear targeting, Applicants attached a nuclear localization signal (NLS) to both modules. In the absence of light (inactive state), TALE-CRY2 binds the promoter region of the target gene while CIB1-effector remains free within the nuclear compartment. Illumination with blue light (peak ˜450 nm) triggers a conformational change in CRY2 and subsequently recruits CIB1-effector (VP64 shown in FIG. 36A) to the target locus to mediate transcriptional modulation. This modular design allows each LITE component to be independently engineered. For example, the same genomic anchor can be combined with activating or repressing effectors (Beerli, R. R., Segal, D. J., Dreier, B. & Barbas, C. F., 3rd. Toward controlling gene expression at will: specific regulation of the erbB-2/HER-2 promoter by using polydactyl zinc finger proteins constructed from modular building blocks. Proceedings of the National Academy of Sciences of the United States of America 95, 14628-14633 (1998) and Cong, L., Zhou, R., Kuo, Y.-c., Cunniff, M. & Zhang, F. Comprehensive interrogation of natural TALE DNA-binding modules and transcriptional repressor domains. Nat Commun 3, 968) to exert positive and negative transcriptional control over the same endogenous genomic locus.

[0471] In order to identify the most effective LITE architecture, Applicants fused TALE and the transcriptional activator VP64 (Beerli, R. R., Segal, D. J., Dreier, B. & Barbas, C. F., 3rd. Toward controlling gene expression at will: specific regulation of the erbB-2/HER-2 promoter by using polydactyl zinc finger proteins constructed from modular building blocks. Proceedings of the National Academy of Sciences of the United States of America 95, 14628-14633 (1998); Zhang, F, et al. Efficient construction of sequence-specific TAL effectors for modulating mammalian transcription. Nat Biotechnol 29, 149-153, doi:10.1038/nbt.1775 (2011); Miller. J. C, et al. A TALE nuclease architecture for efficient genome editing. Nature biotechnology 29, 143-148, doi:10.1038/nbt.1755 (2011) and Hsu, P. D. & Zhang, F. Dissecting neural function using targeted genome engineering technologies. ACS chemical neuroscience 3, 603-610, doi:10.1021/cn300089k (2012).) to different truncations (Kennedy, M. J, et al. Rapid blue-light-mediated induction of protein interactions in living cells. Nature methods 7, 973-975, doi:10.1038/nmeth.1524 (2010)) of CRY2 and CIB, respectively, and assessed the efficacy of each design by measuring blue light illumination induced transcriptional changes of the neural lineage-specifying transcription factor neurogenin 2 (Neurog2) (FIG. 36B). Applicants evaluated full-length CRY2 as well as a truncation consisting of the photolyase homology region alone (CRY2PHR, amino acids 1-498) (Kennedy, M. J, et al. Rapid blue-light-mediated induction of protein interactions in living cells. Nature methods 7, 973-975, doi: 10.1038/nmeth.1524 (2010)). For CIB1, Applicants tested the full-length protein as well as an N-terminal domain-only fragment (CIBN, amino acids 1-170) (Kennedy, M. J, et al. Rapid blue-light-mediated induction of protein interactions in living cells. Nature methods 7, 973-975, doi:10.1038/nmeth.1524 (2010)). 3 out of 4 initial LITE pairings produced significant light-induced Neurog2 mRNA upregulation in Neuro 2a cells (p<0.001, FIG. 36B). Of these, TALE-CRY2PHR::CIB1-VP64 yielded the highest absolute light-mediated mRNA increase when normalized to either GFP-only control or unstimulated LITE samples (FIG. 36B), and was therefore applied in subsequent experiments.

[0472] Having established an effective LITE architecture, Applicants systematically optimized light stimulation parameters, including wavelength (FIG. 40), duty cycle (FIG. 41), and light intensity (FIG. 42 and Example 11) (Banerjee, R, et al. The signaling state of Arabidopsis cryptochrome 2 contains flavin semiquinone. The Journal of biological chemistry 282, 14916-14922, doi:10.1074/jbc.M700616200 (2007)). Applicants also compared the activation domains VP16 and p65 in addition to VP64 to test the modularity of the LITE CIB1-effector component. All three domains produced a significant light-dependent Neurog2 mRNA upregulation (p<0.001, FIG. 43). Applicants selected VP64 for subsequent experiments due to its lower basal activity in the absence of light-stimulation.

[0473] Manipulation of endogenous gene expression presents various challenges, as the rate of expression depends on many factors, including regulatory elements, mRNA processing, and transcript stability (Moore, M. J. & Proudfoot, N. J. Pre-mRNA processing reaches back to transcription and ahead to translation. Cell 136, 688-700, doi:10.1016/j.cell.2009.02.001 (2009) and Proudfoot, N. J., Furger, A. & Dye, M. J. Integrating mRNA processing with transcription. Cell 108, 501-512 (2002)). Although the interaction between CRY2 and CIB1 occurs on a subsecond timescale (Kennedy, M. J, et al. Rapid blue-light-mediated induction of protein interactions in living cells. Nature methods 7, 973-975, doi: 10.1038/nmeth.1524 (2010)), LITE-mediated activation is likely to be limited by the inherent kinetics of transcription. Applicants investigated the on-kinetics of LITE-mediated Neurog2 expression by measuring mRNA levels during a time course of light stimulation from 30 min to 24 h (FIG. 36C). Relative levels of Neurog2 mRNA increased considerably as early as 30 min after the onset of light stimulation and rose steadily until saturating at 12 h with a roughly 20-fold upregulation compared to GFP-transfected negative controls. Similarly, Applicants assessed the off-kinetics of the system by stimulating cells for 6 h and measuring the level of Neurog2 transcripts at multiple time points after ceasing illumination (FIG. 36D). Neurog2 mRNA levels briefly increased up to 30 min post-stimulation, an effect that may have resulted from residual CRY2PHR-CIB1 dimerization or from previously recruited RNA polymerases. Thereafter, Neurog2 expression declined with a half-life of ˜3 h, demonstrating that transcripts return to natural levels in the absence of light stimulation. In contrast, a small-molecule inducible TALE system based on the plant hormone abcisic acid receptor (Liang. F.-S., Ho, W. Q. & Crabtree, G. R. Engineering the ABA Plant Stress Pathway for Regulation of Induced Proximity. Sci. Signal. 4, rs2-, doi:10.1126/scisignal.2001449 (2011)) exhibited slower on- and off-kinetics (FIG. 44), potentially limited by drug diffusion, metabolism, or clearance.

[0474] Applicants next explored the utility of LITEs for neuronal applications via viral transduction. Applicants developed an adeno-associated virus (AAV)-based vector for the delivery of TALE genes and a simplified process for AAV production (FIGS. 37A and B, FIG. 45, and Example 11). The ssDNA-based genome of AAV is less susceptible to recombination, providing an advantage over lentiviral vectors (Holkers, M, et al. Differential integrity of TALE nuclease genes following adenoviral and lentiviral vector gene transfer into human cells. Nucleic acids research 41, e63, doi:10.1093/nar/gks 1446 (2013)).

[0475] To characterize AAV-mediated TALE delivery for modulating transcription in primary mouse cortical neurons, Applicants constructed a panel of TALE-VP64 transcriptional activators targeting 28 murine loci in all, including genes involved in neurotransmission or neuronal differentiation, ion channel subunits, and genes implicated in neurological diseases. DNase I-sensitive regions in the promoter of each target gene provided a guide for TALE binding sequence selections (FIG. 46). Applicants confirmed that TALE activity can be screened efficiently using Applicants' AAV-TALE production process (FIG. 45) and found that TALEs chosen in this fashion and delivered into primary neurons using AAV vectors activated a diverse array of gene targets to varying extents (FIG. 37C). Moreover, stereotactic delivery of AAV-TALEs mediated robust expression in vivo in the mouse prefrontal cortex (FIG. 37D, E). Expression of TALE(Grm2)-VP64 in the mouse infralimbic cortex (ILC) induced a 2.5-fold increase in Grm2 mRNA levels compared to GFP-injected controls (FIG. 37F).

[0476] Having delivered TALE activators into cultured primary neurons, Applicants next sought to use AAV as a vector for the delivery of LITE components. To do so, Applicants needed to ensure that the total viral genome size of each recombinant AAV, with the LITE transgenes included, did not exceed the packaging limit of 4.8 kb (Wu, Z., Yang, H. & Colosi, P. Effect of Genome Size on AAV Vector Packaging. Mol Ther 18, 80-86 (2009)). Applicants shortened the TALE N- and C-termini (keeping 136 aa in the N-terminus and 63 aa in the C-terminus) and exchanged the CRY2PHR (1.5 kb) and CIB1 (1 kb) domains (TALE-CIB1 and CRY2PHR-VP64; FIG. 38A). These LITEs were delivered into primary cortical neurons via co-transduction by a combination of two AAV vectors (FIG. 38B; delivery efficiencies of 83-92% for individual components with >80% co-transduction efficiency). Applicants tested a Grm2-targeted LITE at 2 light pulsing frequencies with a reduced duty cycle of 0.8% to ensure neuron health (FIG. 47). Both stimulation conditions achieved a ˜7-fold light-dependent increase in Grm2 mRNA levels (FIG. 38C). Further study verified that substantial target gene expression increases could be attained quickly (4-fold upregulation within 4 h; FIG. 38D). In addition, Applicants observed significant upregulation of mGluR2 protein after stimulation, demonstrating that changes effected by LITEs at the mRNA level translate to the protein level (p<0.01 vs GFP control, p<0.05 vs no-light condition, FIG. 38E).

[0477] To apply the LITE system in vivo, Applicants stereotactically delivered a 1:1 mixture of high concentration AAV vectors (10¹² DNAseI resistant particles/mL) carrying the Grm2-targeting TALE-CIB and CRY2PHR-VP64 LITE components into ILC of wildtype C57BL/6 mice. To provide optical stimulation of LITE-expressing neurons in vivo, Applicants implanted a fiber optic cannula at the injection site (FIG. 38F and FIG. 48) (Zhang, F, et al. Optogenetic interrogation of neural circuits: technology for probing mammalian brain structures. Nat Protoc 5, 439-456, doi:10.1038/nprot.2009.226 (2010)). Neurons at the injection site were efficiently co-transduced by both viruses, with >80% of transduced cells expressing both TALE(Grm2)-CIB1 and CRY2PHR-VP64 (FIG. 38G and FIG. 49). 8 days post-surgery, Applicants stimulated the ILC of behaving mice by connecting a solid-state 473 nm laser to the implanted fiber cannula. Following a 12 h stimulation period (5 mW, 0.8% duty cycle using 0.5 s light pulses at 0.0167 Hz), brain tissue from the fiber optic cannula implantation site was analyzed (FIG. 38H) for changes in Grm2 mRNA. Applicants observed a significant increase in Gnnrm mRNA after light stimulation compared with unstimulated ILC (p<0.01). Taken together, these results confirm that LITEs enable optical control of endogenous gene expression in cultured neurons and in vivo.

[0478] Due to the persistence of basal up-regulation observed in the no-light condition of in vivo LITE activators, Applicants undertook another round of optimization, aiming to identify and attenuate the source of the background and improve the efficiency of light-mediated gene induction (light/no-light ratio of gene expression). Neurons expressing only the LITE targeting component TALE-CIB1 produced Grn2 mRNA increases similar to those found in unstimulated neurons expressing both LITE components (both p<0.001 versus GFP controls), while the effector component CRY2PHR-VP64 alone did not significantly affect transcription (p>0.05, FIG. 50), implying that the background transcriptional activation caused by LITE could arise solely from the DNA targeting component.

[0479] Accordingly, Applicants carried out a comprehensive screen to reduce the basal target up-regulation caused by TALE-CIB1 (FIG. 51). The optimization focused on two strategies: First, CIB1 is a plant transcription factor and may have intrinsic regulatory effects even in mammalian cells (Liu, H, et al. Photoexcited CRY2 Interacts with CIB1 to Regulate Transcription and Floral Initiation in Arabidopsis. Science 322, 1535-1539, doi:10.1126/science.1163927 (2008)). Applicants sought to eliminate these effects by deleting three CIB1 regions conserved amongst the basic helix-loop-helix transcription factors of higher plants (FIG. 51). Second, Applicants aimed to prevent TALE-CIB1 from binding the target locus in the absence of light. To achieve this, Applicants engineered TALE-CIB1 to localize in cytoplasm until light-induced dimerization with the NLS-containing CRY2PHR-VP64 (FIG. 52). To test both strategies independently or in combination, Applicants evaluated 73 distinct LITE architectures and identified 12 effector-targeting domain pairs (denoted by the “+” column in FIG. 51 and FIG. 53) with both improved light-induction efficiency and reduced overall baseline (fold mRNA increase in the no-light condition compared with the original LITE1.0; p<0.05). One architecture incorporating both strategies, designated LITE2.0, demonstrated the highest light induction (light/no-light=20.4) and resulted in greater than 6-fold reduction of background activation compared with the original architecture (FIG. 38I). Another—LITE1.9.1—produced a minimal background mRNA increase (1.06) while maintaining four-fold light induction (FIG. 53).

[0480] Applicants sought to further expand the range of processes accessible by TALE and LITE modulation. Endogenous transcriptional repression is often mediated by chromatin modifying enzymes such as histone methyltransferases (HMTs) and deacetylases (HDACs). Applicants have previously shown that the mSin3 interaction domain (SID), part of the mSin3-HDAC complex, can be fused with TALE in order to down regulate target genes in 293FT cells (Beerli, R. R., Segal, D. J., Dreier, B. & Barbas, C. F., 3rd. Toward controlling gene expression at will: specific regulation of the erbB-2/HER-2 promoter by using polydactyl zinc finger proteins constructed from modular building blocks. Proceedings of the National Academy of Sciences of the United States of America 95, 14628-14633 (1998) and Cong, L., Zhou, R., Kuo, Y.-c., Cunniff, M. & Zhang, F. Comprehensive interrogation of natural TALE DNA-binding modules and transcriptional repressor domains. Nat Commun 3, 968, (2012)). Hoping to further improve this TALE repressor, Applicants reasoned that four repeats of SID-analogous to the quadruple VP16 tandem repeat architecture of VP64 (Beerli. R. R., Segal, D. J., Dreier, B. & Barbas, C. F., 3rd. Toward controlling gene expression at will: specific regulation of the erbB-2/HER-2 promoter by using polydactyl zinc finger proteins constructed from modular building blocks. Proceedings of the National Academy of Sciences of the United States of America 95, 14628-14633 (1998))—might augment its potency to repress gene transcription. Indeed, TALE-SID4X constructs were twice as effective as TALE-SID in 293FT cells (FIGS. 54A and 54B) and also mediated efficient gene repression in neurons (FIGS. 54C and 54D).

[0481] Applicants hypothesized that TALE-mediated targeting of histone effectors to endogenous loci could induce specific epigenetic modifications, enabling the interrogation of epigenetic as well as transcriptional dynamics (FIG. 39A). Applicants generated CRY2PHR-SID4X constructs and demonstrated light-mediated transcription repression of Grm2 in neurons (FIG. 39B and FIG. 39C), concomitant with ˜2-fold reduction in H3K9 acetylation at the targeted Grm2 promoter (FIG. 39D). In an effort to expand the diversity of histone residue targets for locus specific histone modification, Applicants derived a set of repressive histone effector domains from the literature (Table 6). Drawn from across a wide phylogenetic spectrum, the domains included HDACs, histone methyltransferases (HMTs), and histone acetyltransferase (HAT) inhibitors, as well as HDAC and HMT recruiting proteins. Preference was given to proteins and functional truncations of small size to facilitate efficient AAV packaging. The resulting epigenetic-modifying TALE-histone effector fusion constructs (epiTALEs) were tested in primary neurons and Neuro 2a cells for their ability to repress Grm2 and Neurog2 transcription, respectively (FIG. 39E, FIG. 39F and FIG. 55). In primary neurons, 23 out of 24 epiTALEs successfully repressed transcription of grin2 using the statistical criteria of p<0.05. Similarly, epiTALE expression in Neuro 2a cells led to decreased Neurog2 expression for 20 of the 32 histone effector domains tested (p<0.05). A subset of promising epiTALEs were expressed in primary neurons and Neuro 2a cells and relative histone residue mark levels in the targeted endogenous promoter were quantified by ChIP-RT-qPCR (FIG. 39G, FIG. 39H and FIG. 56). In primary neurons or Neuro 2a cells, levels of H3K9me1, H4K20me3, H3K27me3, H3K9ac, and H4K8ac were altered by epiTALEs derived from, respectively, KYP (A. thaliana), TgSET8 (T. gondii), NUE and PHF19 (C. trachomatis and H. sapiens), Sin3a, Sirt3 and NcoR, (all H. sapiens) and hdac8, RPD3, and Sir2a (X. laevis, S cerevisiae, P. falciparum). These domains provide a ready source of epigenetic effectors to expand the range of transcriptional and epigenetic controls by LITE.

[0482] The ability to achieve spatiotemporally precise in vivo gene regulation in heterogeneous tissues such as the brain would allow researchers to ask questions about the role of dynamic gene regulation in processes as diverse as development, learning, memory, and disease progression. LITEs can be used to enable temporally precise, spatially targeted, and bimodal control of endogenous gene expression in cell lines, primary neurons, and in the mouse brain in vivo. The TALE DNA binding component of LITEs can be customized to target a wide range of genomic loci, and other DNA binding domains such as the RNA-guided Cas9 enzyme (Cong, L, et al. Multiplex genome engineering using CRISPR/Cas systems. Science 339, 819-823 (2013)) may be used in lieu of TALE to enable versatile locus-specific targeting (FIG. 57). Novel modes of LITE modulation can also be achieved by replacing the effector module with new functionalities such as epigenetic modifying enzymes (de Groote, M. L., Verschure, P. J. & Rots, M. G. Epigenetic Editing: targeted rewriting of epigenetic marks to modulate expression of selected target genes. Nucleic acids research 40, 10596-10613, doi:10.1093/narigks863 (2012)). Therefore the LITE system enables a new set of capabilities for the existing optogenetic toolbox and establishes a highly generalizable and versatile platform for altering endogenous gene regulation using light.

[0483] Methods Summary.

[0484] LITE constructs were transfected into in Neuro 2A cells using GenJet. AAV vectors carrying TALE or LITE constructs were used to transduce mouse primary embryonic cortical neurons as well as the mouse brain in vivo. RNA was extracted and reverse transcribed and mRNA levels were measured using TaqMan-based RT-qPCR. Light emitting diodes or solid-state lasers were used for light delivery in tissue culture and in vivo respectively.

[0485] Design and Construction of LITEs.

[0486] All LITE constructs sequences can be found in Example 11.

[0487] Neuro 2a Culture and Experiments.

[0488] Neuro 2a cells (Sigma-Aldrich) were grown in media containing a 1:1 ratio of OptiMEM (Life Technologies) to high-glucose DMEM with GlutaMax and Sodium Pyruvate (Life Technologies) supplemented with 5% HyClone heat-inactivated FBS (Thermo Scientific), 1% penicillin/streptomycin (Life Technologies), and passaged at 1:5 every 2 days. 120,000 cells were plated in each well of a 24-well plate 18-20 h prior to transfection. 1 h before transfection, media was changed to DMEM supplemented with 5% HyClone heat-inactivated FBS and 1% penicillin/streptomycin. Cells were transfected with 1.0 μg total of construct DNA (at equimolar ratios) per well with 1.5 μL of GenJet (SignaGen Laboratories) transfection reagent according to the manufacturer's instructions. Media was exchanged 24 h and 44 h post-transfection and light stimulation was started at 48 h. Stimulation parameters were: 5 mW/cm2, 466 nm, 7% duty cycle (1 s light pulse 0.067 Hz) for 24 h unless indicated otherwise in figure legends. RNA was extracted using the RNeasy kit (Qiagen) according to manufacturer's instructions and 1 μg of RNA per sample was reverse-transcribed using qScript (Quanta Biosystems). Relative mRNA levels were measured by quantitative real-time PCR (qRT-PCR) using TaqMan probes specific for the targeted gene as well as GAPDH as an endogenous control (Life Technologies, see Table 3 for Taqman probe IDs). ΔΔCt analysis was used to obtain fold-changes relative to negative controls transduced with GFP only and subjected to light stimulation. Toxicity experiments were conducted using the LIVE/DEAD assay kit (Life Technologies) according to instructions.

[0489] AAV Vector Production.

[0490] 293FT cells (Life Technologies) were grown in antibiotic-free D10 media (DMEM high glucose with GlutaMax and Sodium Pyruvate, 10% heat-inactivated Hyclone FBS, and 1% 1M HEPES) and passaged daily at 1:2-2.5. The total number of passages was kept below 10 and cells were never grown beyond 85% confluence. The day before transfection, lx 10⁶ cells in 21.5 mL of D10 media were plated onto 15 cm dishes and incubated for 18-22 hours or until ˜80% confluence. For use as a transfection reagent, 1 mg/mL of PEI “Max” (Polysciences) was dissolved in water and the pH of the solution was adjusted to 7.1. For AAV production, 10.4 μg of pDF6 helper plasmid, 8.7 μg of pAAV1 serotype packaging vector, and 5.2 μg of pAAV vector carrying the gene of interest were added to 434 μL of serum-free DMEM and 130 μL of PEI “Max” solution was added to the DMEM-diluted DNA mixture. The DNA/DMEM/PEI cocktail was vortexed and incubated at room temperature for 15 min. After incubation, the transfection mixture was added to 22 mL of complete media, vortexed briefly, and used to replace the media for a 15 cm dish of 293FT cells. For supernatant production, transfection supernatant was harvested at 48 h, filtered through a 0.45 μm PVDF filter (Millipore), distributed into aliquots, and frozen for storage at −80° C.

[0491] Primary Cortical Neuron Culture.

[0492] Dissociated cortical neurons were prepared from C57BL/6N mouse embryos on E16 (Charles River Labs). Cortical tissue was dissected in ice-cold HBSS—(50 mL 10×HBSS, 435 mL dH₂O, 0.3 M HEPES pH 7.3, and 1% penicillin/streptomycin). Cortical tissue was washed 3× with 20 mL of ice-cold HBSS and then digested at 37° C., for 20 min in 8 mL of HBSS with 240 μL of 2.5% trypsin (Life Technologies). Cortices were then washed 3 times with 20 mL of warm HBSS containing 1 mL FBS. Cortices were gently triturated in 2 ml of HBSS and plated at 150,000 cells/well in poly-D-lysine coated 24-well plates (BD Biosciences). Neurons were maintained in Neurobasal media (Life Technologies), supplemented with IX B27 (Life Technologies), GlutaMax (Life Technologies) and 1% penicillin/streptomycin.

[0493] Primary Neuron Transduction and Light Stimulation Experiments.

[0494] Primary cortical neurons were transduced with 250 μL of AAV1 supernatant on DIV 5. The media and supernatant were replaced with regular complete neurobasal the following day. Neurobasal was exchanged with Minimal Essential Medium (Life Technologies) containing IX B27, GlutaMax (Life Technologies) and 1% penicillin/streptomycin 6 days after AAV transduction to prevent formation of phototoxic products from HEPES and riboflavin contained in Neurobasal during light stimulation.

[0495] Light stimulation was started 6 days after AAV transduction (DIV 11) with an intensity of 5 mW/cm², duty cycle of 0.8% (250 ms pulses at 0.033 Hz or 500 ms pulses at 0.016 Hz), 466 nm blue light for 24 h unless indicated otherwise in figure legends. RNA extraction and reverse transcription were performed using the Cells-to-Ct kit according to the manufacturers instructions (Life Technologies). Relative mRNA levels were measured by quantitative real-time PCR (qRT-PCR) using TaqMan probes as described above for Neuro 2a cells.

[0496] Immunohistochemistry of Primary Neurons.

[0497] For immunohistochemistry of primary neurons, cells were plated on poly-D-lysine/laminin coated coverslips (BD Biosciences) after harvesting. AAV1-transductions were performed as described above. Neurons were fixed 7 days post-transduction with 4% paraformaldehyde (Sigma Aldrich) for 15 min at RT. Blocking and permeabilization were performed with 10% normal goat serum (Life Technologies) and 0.5% Triton-X100 (Sigma-Aldrich) in DPBS (Life Technologies) for 1 h at room temperature. Neurons were incubated with primary antibodies overnight at 4° C., washed 3× with DPBS and incubated with secondary antibodies for 90 min at RT. For antibody providers and concentrations used, see Table 4. Coverslips were finally mounted using Prolong Gold Antifade Reagent with DAPI (Life Technologies) and imaged on an Axio Scope A.1 (Zeiss) with an X-Cite 120Q light source (Lumen Dynamics). Image were acquired using an AxioCam MRm camera and AxioVision 4.8.2.

[0498] Western Blots.

[0499] For preparation of total protein lysates, primary cortical neurons were harvested after light stimulation (see above) in ice-cold lysis buffer (RIPA, Cell Signaling; 0.1% SDS, Sigma-Aldrich; and cOmplete ultra protease inhibitor mix, Roche Applied Science). Cell lysates were sonicated for 5 min at ‘M’ setting in a Bioruptor sonicator (Diagenode) and centrifuged at 21,000×g for 10 min at 4° C. Protein concentration was determined using the RC DC protein assay (Bio-Rad). 30-40 pig of total protein per lane was separated under non-reducing conditions on 4-15% Tris-HCl gels (Bio-Rad) along with Precision Plus Protein Dual Color Standard (Bio-Rad) After wet electrotransfer to polyvinylidene difluoride membranes (Millipore) and membrane blocking for 45 min in 5% BLOT-QuickBlocker (Millipore) in Tris-buffered saline (TBS, Bio-Rad), western blots were probed with anti-mGluR2 (Abeam, 1:1.000) and anti-α-tubulin (Sigma-Aldrich 1:20,000) overnight at 4° C., followed by washing and anti-mouse-IgG HRP antibody incubation (Sigma-Aldrich, 1:5,000-1:10,000). For further antibody details see Table 4. Detection was performed via ECL Western blot substrate (SuperSignal West Femto Kit, Thermo Scientific). Blots were imaged with an AlphaImager (Innotech) system, and quantified using ImageJ software 1.46r.

[0500] Production of Concentrated and Purified AAV1/2 Vectors.

[0501] Production of concentrated and purified AAV for stereotactic injection in-vivo was done using the same initial steps outlined above for production of AAV1 supernatant. However, for transfection, equal ratios of AAV1 and AAV2 serotype plasmids were used instead of AAV1 alone. 5 plates were transfected per construct and cells were harvested with a cell-scraper 48 h post transfection. Purification of AAV1/2 particles was performed using HiTrap heparin affinity columns (GE Healthcare) (McClure, C., Cole, K. L., Wulff, P., Klugmann, M. & Murray, A. J. Production and titering of recombinant adeno-associated viral vectors. J Vis Exp, e3348, doi:10.3791/3348 (2011)). Applicants added a second concentration step down to a final volume of 100 μl per construct using an Amicon 500 μl concentration column (100 kDa cutoff, Millipore) to achieve higher viral titers. Titration of AAV was performed by qRT-PCR using a custom Taqman probe for WPRE (Life Technologies). Prior to qRT-PCR, concentrated AAV was treated with DNaseI (New England Biolabs) to achieve a measurement of DNaseI-resistant particles only. Following DNaseI heat-inactivation, the viral envelope was degraded by proteinase K digestion (New England Biolabs). Viral titer was calculated based on a standard curve with known WPRE copy numbers.

[0502] Stereotactic Injection of AAV1/2 and Optical Implant.

[0503] All animal procedures were approved by the MIT Committee on Animal Care. Adult (10-14 weeks old) male C57BL/6N mice were anaesthetized by intraperitoneal (i.p.) injection of Ketamine/Xylazine (100 mg/kg Ketamine and 10 mg/kg Xylazine) and pre-emptive analgesia was given (Buprenex, 1 mg/kg, i.p.). Craniotomy was performed according to approved procedures and 1 μl of AAV1/2 was injected into ILC at 0.35/1.94/-2.94 (lateral, anterior and inferior coordinates in mm relative to bregma). During the same surgical procedure, an optical cannula with fiber (Doric Lenses) was implanted into ILC unilaterally with the end of the optical fiber located at 0.35/1.94/-2.64 relative to bregma. The cannula was affixed to the skull using Metabond dental cement (Parkell Inc) and Jet denture repair (Lang dental) to build a stable cone around it. The incision was sutured and proper post-operative analgesics were administered for three days following surgery.

[0504] Immunohistochemistry on ILC Brain Sections.

[0505] Mice were injected with a lethal dose of Ketamine/Xylazine anaesthetic and transcardially perfused with PBS and 4% paraformaldehyde (PFA). Brains were additionally fixed in 4% PFA at 4° C., overnight and then transferred to 30% sucrose for cryoprotection overnight at room temperature. Brains were then transferred into Tissue-Tek Optimal Cutting Temperature (OCT) Compound (Sakura Finetek) and frozen at −80° C. 18 μm sections were cut on a cryostat (Leica Biosystems) and mounted on Superfrost Plus glass slides (Thermo Fischer). Sections were post-fixed with 4% PFA for 15 min, and immunohistochemistry was performed as described for primary neurons above.

[0506] Light Stimulation and mRNA Level Analysis in ILC.

[0507] 8 days post-surgery, awake and freely moving mice were stimulated using a 473 nm laser source (OEM Laser Systems) connected to the optical implant via fiber patch cables and a rotary joint. Stimulation parameters were the same as used on primary neurons: 5 mW (total output), 0.8% duty cycle (500 ms light pulses at 0.016 Hz) for a total of 12 h. Experimental conditions, including transduced constructs and light stimulation are listed in Table 5.

[0508] After the end of light stimulations, mice were euthanized using CO₂ and the prefrontal cortices (PFC) were quickly dissected on ice and incubated in RNA later (Qiagen) at 4° C., overnight. 200 μm sections were cut in RNA later at 4° C., on a vibratome (Leica Biosystems). Sections were then frozen on a glass coverslide on dry ice and virally transduced ILC was identified under a fluorescent stereomicroscope (Leica M165 FC). A 0.35 mm diameter punch of ILC, located directly ventrally to the termination of the optical fiber tract, was extracted (Harris uni-core, Ted Pella). The brain punch sample was then homogenized using an RNase-free pellet-pestle grinder (Kimble Chase) in 50 μl Cells-to-Ct RNA lysis buffer and RNA extraction, reverse transcription and qRT-PCR was performed as described for primary neuron samples.

[0509] Chromatin Immunoprecipitation.

[0510] Neurons or Neuro2a cells were cultured and transduced or transfected as described above. ChIP samples were prepared as previously described (Blecher-Gonen, R, et al. High-throughput chromatin immunoprecipitation for genome-wide mapping of in vivo protein-DNA interactions and epigenomic states. Nature protocols 8, 539-554 (2013)) with minor adjustments for the cell number and cell type. Cells were harvested in 24-well format, washed in 96-well format, and transferred to microcentrifuge tubes for lysis. Sample cells were directly lysed by water bath sonication with the Biorupter sonication device for 21 minutes using 30 s on/off cycles (Diagenode), qPCR was used to assess enrichment of histone marks at the targeted locus.

[0511] Statistical Analysis.

[0512] All experiments were performed with a minimum of two independent biological replicates. Statistical analysis was performed with Prism (GraphPad) using Student's two-tailed t-test when comparing two conditions, ANOVA with Tukey's post-hoc analysis when comparing multiple samples with each other, and ANOVA with Dunnett's post-hoc analysis when comparing multiple samples to the negative control.

### Example 11

### Supplementary Information to Example 10: Optical Control of Endogenous Mammalian Transcription

[0513] Photostimulation Hardware—In Vitro

[0514] In vitro light stimulation experiments were performed using a custom built LED photostimulation device. All electronic elements were mounted on a custom printed circuit board (ExpressPCB). Blue LEDs with peaks 466 nm (model #: YSL-R542B5C-A11, China Young Sun LED Technology; distributed by SparkFun Electronics as ‘LED—Super Bright Blue’ COM-00529), were arrayed in groups of three aligned with the wells of a Corning 24-well plate. LED current flow was regulated by a 25 mA DynaOhm driver (LEDdymanics #4006-025). Columns of the LED array were addressed by TTL control (Fairchild Semiconductor PN2222BU-ND) via an Arduino UNO microcontroller board. Light output was modulated via pulse width modulation. Light output was measured from a distance of 80 mm above the array utilizing a Thorlabs PM100D power meter and S120VC photodiode detector. In order to provide space for ventilation and to maximize light field uniformity, an 80 mm tall ventilation spacer was placed between the LED array and the 24-well sample plate. Fans (Evercool EC5015M12CA) were mounted along one wall of the spacer unit, while the opposite wall was fabricated with gaps to allow for increased airflow.

[0515] Quantification of LIVE/DEAD® Assay Using ImageJ Software.

[0516] Images of LIVE/DEAD (Life Technologies) stained cells were captured by fluorescence microscopy and processed as follows: Background was subtracted (Process→Subtract Background). A threshold based on fluorescence area was set to ensure accurate identification of cell state (Image→Adjust→Threshold). A segmentation analysis was performed to enable automated counting of individual cells (Process→Binary→Watershed). Finally, debris signals were filtered and cells were counted (Analyze→Analyze Particles). Toxicity was determined as the percentage of dead cells.

[0517] Chemically-Inducible TALEs.

[0518] Neuro2A cells were grown in a medium containing a 1:1 ratio of OptiMEM (Life Technologies) to high-glucose DMEM with GlutaMax and Sodium Pyruvate (Life Technologies) supplemented with 5% HyClone heat-inactivated FBS (Thermo Scientific), 1% penicillin/streptomycin (Life Technologies) and 25 mM HEPES (Sigma Aldrich). 150,000 cells were plated in each well of a 24-well plate 18-24 hours prior to transfection. Cells were transfected with 1 μg total of construct DNA (at equimolar ratios) per well and 2 μL of Lipofectamine 2000 (Life Technologies) according to the manufacturer's recommended protocols. Media was exchanged 12 hours post-transfection. For the kinetics test, chemical induction was started 24 hours post-transfection, when abscisic acid (ABA, Sigma Aldrich) was added to fresh media to a final concentration of 250 μM. RNA was extracted using the RNeasy kit (Qiagen) according to manufacturer's instructions and 1 μg of RNA per sample was reverse-transcribed using qScript (Quanta Biosystems). Relative mRNA levels were measured by quantitative real-time PCR (qRT-PCR) using Taqman probes specific for the targeted gene as well as mouse GAPDH as an endogenous control (Life Technologies, see Supplementary Table 2 for Taqman probe IDs). ΔΔCt analysis was used to obtain fold-changes relative to negative controls where cells were subjected to mock transfection with GFP.

[0519] Cas9 Transcriptional Effectors.

[0520] HEK 293FT cells were co-transfected with mutant Cas9 fusion protein and a synthetic guide RNA (sgRNA) using Lipofectamine 2000 (Life Technologies) 24 hours after seeding into a 24 well dish. 72 hours post-transfection, total RNA was purified (RNeasy Plus, Qiagen), 1 ug of RNA was reverse transcribed into eDNA (qScript, Quanta BioSciences). Quantitative real-time PCR was done according to the manufacturer's protocol (Life Technologies) and performed in triplicate using TaqMan Assays for hKlf4 (Hs00358836_m1), hSox2 (Hs01053049_s1), and the endogenous control GAPDH (Hs02758991_g1).

[0521] The hSpCas9 activator plasmid was cloned into a lentiviral vector under the expression of the hEF1a promoter (pLenti-EFIa-Cas9-NLS-VP64). The hSpCas9 repressor plasmid was cloned into the same vector (pLenti-EF1α-SID4x-NLS-Cas9-NLS). Guide sequences (20 bp) targeted to the KLF4 locus are: GCGCGCTCCACACAACTCAC (SEQ ID NO: 92), GCAAAAATAGACAATCAGCA (SEQ ID NO: 93), GAAGGATCTCGGCCAATTTG (SEQ ID NO: 94). Spacer sequences for guide RNAs targeted to the SOX2 locus are: GCTGCCGGGTTTTGCATGAA (SEQ ID NO: 95), CCGGGCCCGCAGCAAACTTC (SEQ ID NO: 96), GGGGCTGTCAGGGAATAAAT (SEQ ID NO: 97).

[0522] Optogenetic Actuators:

[0523] Microbial and plant-derived light-sensitive proteins have been engineered as optogenetic actuators, allowing optical control of cellular functions including membrane potential (Deisseroth, K. Optogenetics. Nature methods 8, 26-29, doi:10.1038/nmeth.f.324 (2011); Zhang, F, et al. The microbial opsin family of optogenetic tools. Cell 147, 1446-1457, doi:10.1016/j.cell.2011.12.004 (2011) and Yizhar, O., Fenno, L. E., Davidson, T. J., Mogri, M. & Deisseroth, K. Optogenetics in neural systems. Neuron 71, 9-34, doi:10.1016/j.neuron.2011.06.004 (2011)), intracellular biochemical signaling (Airan, R. D., Thompson, K. R., Fenno, L. E., Bernstein, H. & Deisseroth. K. Temporally precise in vivo control of intracellular signalling. Nature 458, 1025-1029, doi:10.1038/nature07926 (2009)), protein interactions (Levskaya, A., Weiner, O. D., Lim, W. A. & Voigt, C. A. Spatiotemporal control of cell signalling using a light-switchable protein interaction. Nature 461, 997-1001, doi:10.1038/nature08446 (2009); Yazawa, M., Sadaghiani, A. M., Hsueh, B. & Dolmetsch, R. E. Induction of protein-protein interactions in live cells using light. Nat Biotechnol 27, 941-945, doi:10.1038/nbt.1569 (2009); Strickland, D, et al. TULIPs: tunable, light-controlled interacting protein tags for cell biology. Nature methods 9, 379-384, doi:10.1038/nmeth.1904 (2012) and Kennedy, M. J, et al. Rapid blue-light-mediated induction of protein interactions in living cells. Nature methods 7, 973-975, doi:10.1038/nmeth.1524 (2010)), and heterologous gene expression (Yazawa, M., Sadaghiani, A. M., Hsueh, B. & Dolmetsch, R. E. Induction of protein-protein interactions in live cells using light. Nat Biotechnol 27, 941-945, doi:10.1038/nbt.1569 (2009); Kennedy, M. J, et al. Rapid blue-light-mediated induction of protein interactions in living cells. Nature methods 7, 973-975, doi:10.1038/nmeth.1524 (2010); Shimizu-Sato, S., Huq, E., Tepperman, J. M. & Quail, P. H. A light-switchable gene promoter system. Nat Biotechnol 20, 1041-1044, doi: 10.1038/nbt734 (2002); Ye, H., Daoud-El Baba, M., Peng, R. W. & Fussenegger, M. A synthetic optogenetic transcription device enhances blood-glucose homeostasis in mice. Science 332, 1565-1568, doi:10.1126/science.1203535 (2011); Wang, X., Chen, X. & Yang, Y. Spatiotemporal control of gene expression by a light-switchable transgene system. Nature methods 9, 266-269, doi:10.1038/nmeth.1892 (2012) and Polstein, L. R. & Gersbach, C. A. Light-inducible spatiotemporal control of gene activation by customizable zinc finger transcription factors. J Am Chem Soc 134, 16480-16483, doi:10.1021/ja3065667 (2012)).

[0524] Ambient Light Exposure:

[0525] All cells were cultured at low light levels (<0.01 mW/cm²) at all times except during stimulation. These precautions were taken as ambient light in the room (0.1-0.2 mW/cm²) was found to significantly activate the LITE system (FIG. 36D). No special precautions were taken to shield animals from light during in vive experiments—even assuming ideal propagation within the implanted optical fiber, an estimation of light transmission at the fiber terminal due to ambient light was <0.01 mW (based on 200 μm fiber core diameter and 0.22 numerical aperture).

[0526] Optimization of Light Stimulation Parameters in Neuro2A Cells:

[0527] To minimize near-UV induced cytotoxicity, Applicants selected 466 nm blue LEDs to activate TALE-CRY2, a wavelength slightly red-shifted from the CRY2 absorption maxima of 450 nm but still maintaining over 80% activity (Banerjee, R, et al. The signaling state of Arabidopsis cryptochrome 2 contains flavin semiquinone. J Biol Chem 282, 14916-14922, doi:10.1074/jbc.M700616200 (2007)) (FIG. 42). To minimize light exposure, Applicants selected a mild stimulation protocol (1 s light pulses at 0.067 Hz, ˜7% duty cycle). This was based on Applicants' finding that light duty cycle had no significant effect on LITE-mediated transcriptional activation over a wide range of duty cycle parameters (1.7% to 100% duty cycles, FIG. 41). Illumination with a range of light intensities from 0 to 10 mW/cm² revealed that Ngn2 mRNA levels increased as a function of intensity up to 5 mW/cm². However, increases in Ngn2 mRNA levels declined at 10 mW/cm² (FIG. 36C), suggesting that higher intensity light may have detrimental effects on either LITE function or on cell physiology. To better characterize this observation, Applicants performed an ethidium homodimer-1 cytotoxicity assay with a calcein counterstain for living cells and found a significantly higher percentage of ethidium-positive cells at the higher stimulation intensity of 10 mW/cm. Conversely, the ethidium-positive cell count from 5 mW/cm² stimulation was indistinguishable from unstimulated controls. Thus 5 mW/cm² appeared to be optimal for achieving robust LITE activation while maintaining low cytotoxicity.

[0528] Reduction of Light-Induced Toxicity in Primary Neurons:

[0529] Initial application of LITEs in neurons revealed that cultured neurons were much more sensitive to blue light than Neuro 2a cells. Stimulation parameters that Applicants previously optimized for Neuro 2a cells (466 nm, 5 mW/cm² intensity, 7% duty cycle with 1 s light pulse at 0.067 Hz for a total of 24 h) caused >50% toxicity in primary neurons. Applicants therefore tested survival with a lower duty cycle, as Applicants had previously observed that a wide range of duty cycles had little effect on LITE-mediated transcriptional activation (FIG. 41). A reduced duty cycle of 0.8% (0.5 s light pulses at 0.0167 Hz) at the same light intensity (5 mW/cm²) was sufficient to maintain a high survival rate that was indistinguishable from that of unstimulated cultures (FIG. 47).

[0530] Light Propagation and Toxicity in In Vivo Experiments:

[0531] Previous studies have investigated the propagation efficiency of different wavelengths of light in brain tissue. For 473 nm light (wavelength used in this study), there was a >90% attenuation after passing through 0.35 mm of tissue (Witten, IIana B, et al. Recombinase-Driver Rat Lines: Tools, Techniques, and Optogenetic Application to Dopamine-Mediated Reinforcement. Neuron 72, 721-733, doi:http:/dx.doi.or/10.016/j.neuron.2011.10.028 (2011)). An estimated 5 mW/cm² light power density was estimated based on a tissue depth of 0.35 mm of tissue (the diameter of brain punch used in this study) and a total power output of 5 mW. The light stimulation duty cycle used in vivo was the same (0.8%, 0.5 s at 0.0167 Hz) as that used for primary neurons (FIG. 47).

[0532] CRY2 Absorption Spectrum:

[0533] An illustration of the absorption spectrum of CRY2 was shown in FIG. 42. The spectrum showed a sharp drop in absorption above 480 nm (Banerjee, R. et al. The Signaling State of Arabidopsis Cryptochrome 2 Contains Flavin Semiquinone. Journal of Biological Chemistry 282, 14916-14922, doi: 10.1074/jbc.M700616200 (2007)). Wavelengths>500 nm were virtually not absorbed, which could be useful for future multimodal optical control with yellow or red-light sensitive proteins.

[0534] Development of AAV1 Supernatant Process:

[0535] Traditional AAV particle generation required laborious production and purification processes, and made testing many constructs in parallel impractical (Grieger, J. C., Choi, V. W. & Samulski, R. J. Production and characterization of adeno-associated viral vectors. Nat Protoc 1, 1412-1428, doi: 10.1038/nprot.2006.207 (2006)). In this study, a simple yet highly effective process of AAV production using filtered supernatant from transfected 293FT cells (FIG. 43). Recent reported indicate that AAV particles produced in 293FT cells could be found not only it the cytoplasm but also at considerable amounts in the culture media (Lock M, A. M., Vandenberghe L H, Samanta A, Toelen J, Debyser Z, Wilson J M. Rapid, Simple, and Versatile Manufacturing of Recombinant Adeno-Associated Viral Vectors at Scale. Human Gene Therapy 21, 1259-1271, doi:10.1089/hum.2010.055 (2010)). The ratio of viral particles between the supernatant and cytosol of host cells varied depending on the AAV serotype, and secretion was enhanced if polyethylenimine (PEI) was used to transfect the viral packaging plasmids (Lock M, A. M., Vandenberghe L H, Samanta A, Toelen J, Debyser Z, Wilson J M. Rapid, Simple, and Versatile Manufacturing of Recombinant Adeno-Associated Viral Vectors at Scale. Human Gene Therapy 21, 1259-1271, doi:10.1089/hum.2010.055 (2010)). In the current study, it was found that 2×10⁵ 293FT cells transfected with AAV vectors carrying TALEs (FIG. 38A) and packaged using AAV1 serotype were capable of producing 250 μl of AAV1 at a concentration of 5.6±0.24×10¹⁰ DNAseI resistant genome copies (gc) per mL. 250 μl of filtered supernatant was able to transduce 150,000 primary cortical neurons at efficiencies of 80-90% (FIG. 38B and FIG. 43). This process was also successfully adapted to a 96-well format, enabling the production of 125 ul AAV1 supernatant from up to 96 different constructs in parallel. 35 ul of supernatant can then be used to transduce one well of primary neurons cultured in 96-well format, enabling the transduction in biological triplicate from a single well.

TABLE 3
Product information for all Taqman probes (Life Technologies)

| Target | Species | Probe # |
|---|---|---|
| Ngn2 | mouse | Mm00437603_g1 |
| Grm/5 (mGluR5) | mouse | Mm00690332_m1 |
| Grm2 (mGluR2) | mouse | Mm01235831_m1 |
| Grin2a (NMDAR2A) | mouse | Mm00433802_m1 |
| GAPD (GAPDH) | mouse | 4352932E |
| KLF4 | human | Hs00358836_m1 |
| GAPD (GAPDH) | human | 4352934E |
| WPRE | custom | |
| 5-HT1A | mouse | Mm00434106_s1 |
| 5-HT1B | mouse | Mm00439377_s1 |
| 5-HTT | mouse | Mm00439391_m1 |
| Arc | mouse | Mm00479619_g1 |
| BDNF | mouse | Mm04230607_s1 |
| c-Fos | mouse | Mm00487425_m1 |
| CBP/P300 | mouse | Mm01342452_m1 |
| CREB | mouse | Mrn00501607_m1 |
| CRHR1 | mouse | Mm00432670_m1 |
| DNMT1 | mouse | Mm01151063_m1 |
| DNMT3a | mouse | Mm00432881_m1 |
| DNMT3b | mouse | Mm01240113_m1 |
| egr-1 (zif-268) | mouse | Mm00656724_m1 |
| Gad65 | mouse | Mm00484623_m1 |
| Gad67 | mouse | Mm00725661_s1 |
| GR (GCR, NR3C1 ) | mouse | Mm00433832_m1 |
| HAT1 | mouse | Mm00509140_m1 |
| HCRTR1 | mouse | Mm01185776_m1 |
| HCRTR2 | mouse | Mm01179312_m1 |
| HDAC1 | mouse | Mm02391771_g1 |
| HDAC2 | mouse | Mm00515108_m1 |
| HDAC4 | mouse | Mm01299557_m1 |
| JMJD2A | mouse | Mrn00805000_m1 |
| M1 (CHRM1) | mouse | Mm00432509_s1 |
| MCH-R1 | mouse | Mm00653044_m1 |
| NET (SLC6A2) | mouse | Mm00436661_m1 |
| NR2B subunit | mouse | Mm00433820_m1 |
| OXTR | mouse | Mm01182684_m1 |
| Scn1a | mouse | Mm00450580_m1 |
| SIRT1 | mouse | Mm00490758_m1 |
| Tet1 | mouse | Mm01169087_m1 |
| Tet2 | mouse | Mm00524395_m1 |
| Tet3 | mouse | Mm00805756_m1 |

TABLE 4
Clone, product numbers and concentrations for antibodies used in this study
Primary Antibodies

| Target | Host | Clone # | Manufacturer | Product # | IsoType | Concentration |
|---|---|---|---|---|---|---|
| mGluR2 | mouse | mG2Na-s | Abcam | Ab15672 | IgG | 1:1000 |
| α-tubulin | mouse | B-5-1-2 | Sigma-Aldrich | T5168 | IgG1 | 1:20000 |
| NeuN | mouse | A60 | Millipore | MAB377 | IgG1 | 1:200 |
| HA (Alexa | mouse | 6E2 | Cell Signaling | 3444 | IgG1 | 1:100 |
| Fluor 594 | | | | | | |
| GFP | chicken | polyclonal | Aves Labs | GFP-1020 | IgY | 1:500 |
| Target | Host | Conjugate | Manufacturer | Product # | Concentration | |
| mouse IgG | goat | HRP | Sigma-Aldrich | A9917 | 1:5000-10000 | |
| mouse IgG | goat | Alexa Fluor | Life | A11005 | 1:1000 | |
| | | 594 | Technologies | | | |
| chicken IgG | Goat | Alexa Fluor | Life | A11039 | 1:1000 | |
| | | 488 | Technologies | | | |
| Target | Host | Epitope | Manufacturer | Product # | IsoType | Concentration |
| H3K9me1 | mouse | 1-18 | Millipore | 17-680 | IgG | 2 μl/IP |
| H3K9me2 | mouse | 1-18 | Millipore | 17-681 | IgG | 4 μl/IP |
| H3K9Ac | rabbit | polyclonal | Millipore | 17-658 | lgG | 3 μg/IP |
| H4K20me1 | rabbit | 15-24 | Millipore | 17-651 | IgG | 4 μg/IP |
| H4K8Ac | rabbit | polyclonal | Millipore | 17-10099 | IgG | 1.5 μl/IP |
| H4K20me3 | rabbit | 18-22 | Millipore | 17-671 | IgG | 7 μl/IP |
| H3K27me3 | rabbit | polyclonal | Millipore | 17-622 | IgG | 4 μg/IP |

TABLE 5
qPCR primers used for CHIP-qpCR

| target | Primers |
|---|---|
| Grm2 | Fomard: CTGTGCTGAAGGATCTGGGG |
| promoter | (SEQ ID NO: 98) |
| | Reverse: ATGCTGCAGGCATAGGACAA |
| | (SEQ ID NO: 99) |
| Neurog2 | Forward: GAGGGGGAGAGGGACTAAAGA |
| promoter | (SEQ ID NO: 100) |
| | Reverse: GCTCTCCCTCCCCAGCTTA |
| | (SEQ ID NO: 101) |
| Myt-1 | Cell Signaling Technologies SimpleChIP ™ |
| promoter | Mouse MYT-1 Promoter Primers #8985 |
| control | |
| RPL30 | Cell Signaling Technologies SimpleChIP ™ |
| Intron 2 | Mouse RPL30 Intron 2 Primers #7015 |
| control | |

TABLE 6
genomic sequences targeted by TALEs

| | | |
|---|---|---|
| 5-HT1B | TATCTGAACTCTCC | SEQ ID NO: 102 |
| 5-HTT | TGTCTGTCTTGCAT | SEQ ID NO: 103 |
| Arc | TGGCTGTTGCCAGG | SEQ ID NO: 104 |
| BDNF | TACCTGGAGCTAGC | SEQ ID NO: 105 |
| c-Fos | TACACAGGATGTCC | SEQ ID NO: 106 |
| DNMT3a | TTGGCCCTGTGCAG | SEQ ID NO: 107 |
| DNMT3b | TAGCGCAGCGATCG | SEQ ID NO: 108 |
| gad65 | TATTGCCAAGAGAG | SEQ ID NO: 109 |
| gad67 | TGACTGGAACATAC | SEQ ID NO: 110 |
| GR (GCR, NR3C1) | TGATGGACTTGTAT | SEQ ID NO: 111 |
| HAT1 | TGGACCTTCTCCCT | SEQ ID NO: 112 |
| HCRTR1 | TAGGTCTCCTGGAG | SEQ ID NO: 113 |
| HCRTR2 | TGGCTCAGGAACTT | SEQ ID NO: 114 |
| HDAC1 | TTCTCTAAGCTGCC | SEQ ID NO: 115 |
| HDAC2 | TGAGCCCTGGAGGA | SEQ ID NO: 116 |
| HDAC4 | TGCCTAAGATGGAG | SEQ ID NO: 117 |
| JMJD2A | TGTAGTGAGTGTTC | SEQ ID NO: 118 |
| MCH-R1 | TGTCTAGGTGATGT | SEQ ID NO: 119 |
| NET | TCTCTGCTAGAAGG | SEQ ID NO: 120 |
| Scn1a | TCTAGGTCAAGTGT | SEQ ID NO: 121 |
| SIRT1 | TCCTCTGCTCCGCT | SEQ ID NO: 122 |
| tet1 | TCTAGGAGTGTAGC | SEQ ID NO: 123 |
| tet3 | TGCCTGGCTGCTGG | SEQ ID NO: 124 |
| 5-HT1B | TATCTGAACTCTCC | SEQ ID NO: 125 |
| Grm2 | TCAGAGCTGTCCTC | SEQ ID NO: 126 |
| Grm5 | TGCAAGAGTAGGAG | SEQ ID NO: 127 |
| 5-HT2A | TAGTGACTGATTCC | SEQ ID NO: 128 |
| Grin2a | TTGGAGGAGCACCA | SEQ ID NO: 129 |
| Neurog2 | TGAATGATGATAATAC | SEQ ID NO: 130 |

TABLE 7
Viral transduction and light stimulation parameters for
in vivo LITE-mediated activation of Grm2 in the mouse infralimbic
cortex (ILC). Grm2 mRNA levels in the ipsilateral LITE-expressing
hemisphere are compared with the contralateral mCherry-expressing
control hemisphere for all three experimental conditions shown in FIG. 39J.

| Experimental | ILC Hemisphere | | ILC Hemisphere |
|---|---|---|---|
| condition | (ipsilateral) | | (contralateral) |
| | AAV vector | Light | AAV vector |
| | | stimulation | |
| GFP | GFP | yes | mCherry |
| LITEs/no Light | TALE-CIB1:: | no | mCherry |
| | CRY2PHR-VP64 | | |
| LITEs/+ Light | TALE-CIB1:: | yes | mCherry |
| | CRY2PHR-VP64 | | |

TABLE 8
HDAC Recruiter Effector Domains

| | | Substrate | | | Full | Selected | Final | |
|---|---|---|---|---|---|---|---|---|
| Subtype/ | | (if | Modification | | size | truncation | size | Catalytic |
| Complex | Name | known) | (if known) | Organism | (aa) | (aa) | (aa) | domain |
| Sin3a | MeCP2 | — | — | R. norvegicus | 492 | 207-492 | 286 | — |
| | | | | | | (Nan) | | |
| Sin3a | MBD2b | — | — | H. sapiens | 262 | 45-262 | 218 | — |
| | | | | | | (Boeke) | | |
| Sin3a | Sin3a | — | — | H. sapiens | 1273 | 524-851 | 328 | 627-829: |
| | | | | | | (Laherty) | | HDAC1 |
| | | | | | | | | interaction |
| NcoR | NcoR | — | — | H. sapiens | 2440 | 420-488 | 69 | — |
| | | | | | | (Zhang) | | |
| NuRD | SALL1 | — | — | M. musculus | 1322 | 1-93 | 93 | — |
| | | | | | | (Lauberth) | | |
| CoREST | RCOR1 | — | — | H. sapiens | 482 | 81-300 | 220 | — |
| | | | | | | (Gu, Ouyang) | | |

Nan, X. et al. Transcriptional repression by the methyl-CpG-binding protein MeCP2 involves a histone deacetylase complex. Nature 393, 386-389 (1998).
Boeke, J., Ammerpohl, O., Kegel, S., Moehren, U. & Renkawitz, R. The minimal repression domain of MBD2b overlaps with the methyl-CpG-binding domain and binds directly to Sin3A. Journal of Biological Chemistry 275, 34963-34967 (2000).
Laherty, C. D. et al. Histone deacetylases associated with the mSin3 corepressor mediate mad transcriptional repression. Cell 89, 349-356 (1997).
Zhang, J., Kalkum, M., Chait, B. T. & Roeder, R. G. The N-CoR-HDAC3 nuclear receptor corepressor complex inhibits the JNK pathway through the integral subunit GPS2. Molecular cell 9, 611-623 (2002).
Lauberth, S. M. & Rauchman, M. A conserved 12-amino acid motif in Sall1 recruits the nucleosome remodeling and deacetylase corepressor complex. Journal of Biological Chemistry 281, 23922-23931 (2006).
Gu, H. & Roizman, B. Herpes simplex virus-infected cell protein 0 blocks the silencing of viral DNA by dissociating histone deacetylases from the CoREST, ÄìEST complex.
Ouyang, J., Shi, Y., Valin, A., Xuan, Y. & Gill, G. Direct binding of CoREST1 to SUMO-2/3 contributes to gene-specific repression by the LSD1/CoREST1/HDAC complex. Molecular cell 34, 145-154 (2009)

TABLE 9
HDAC Effector Domains

| | | | | | Full | Selected | Final | |
|---|---|---|---|---|---|---|---|---|
| Subtype/ | | Substrate | Modification | | size | truncation | size | Catalytic |
| Complex | Name | (if known) | (if known) | Organism | (aa) | (aa) | (aa) | domain |
| HDAC I | HDAC8 | — | — | X laevis | 325 | 1-325 | 325 | 1-272: HDAC |
| HDAC I | RPD3 | — | — | S. cerevisiae | 433 | 19-340 | 322 | 19-331: HDAC |
| | | | | | | | (Vannier) | |
| HDAC IV | MesoLo4 | — | — | M. loti | 300 | 1-300 | 300 | — |
| | | | | | | (Gregoretti) | | |
| HDAC IV | HDAC11 | — | — | H. sapiens | 347 | 1-347 | 347 | 14-326: HDAC |
| | | | | | | (Gao) | | |
| HD2 | HDT1 | — | — | A. thaliana | 245 | 1-211 | 211 | — |
| | | | | | | (Wu) | | |
| SIRT I | SIRT3 | H3K9Ac | — | H. sapiens | 399 | 143-399 | 257 | 126-382: SIRT |
| | | H4K16Ac | | | | (Scher) | | |
| | | H3K56Ac | | | | | | |
| SIRT I | HST2 | — | — | C. albicans | 331 | 1-331 | 331 | — |
| | | | | | | (Hnisz) | | |
| SIRT I | CobB | — | — | E. coli (K12) | 242 | 1-242 | 242 | — |
| | | | | | | (Landry) | | |
| SIRT I | HST2 | — | — | S. cerevisiae | 357 | 8-298 | 291 | — |
| | | | | | | (Wilson) | | |
| SIRT III | SIRT5 | H4K8Ac | — | H. sapiens | 310 | 37-310 | 274 | 41-309: SIRT |
| | | H4K16Ac | | | | (Gertz) | | |
| SIRT III | Sir2A | — | — | P. falciparum | 273 | 1-273 | 273 | 19-273: SIRT |
| | | | | | | (Zhu) | | |
| SIRT IV | SIRT6 | H3K9Ac | — | H sapiens | 355 | 1-289 | 289 | 35-274: SIRT |
| | | H3K56Ac | | | | (Tennen) | | |

Vannier, D., Balderes, D. & Shore, D. Evidence that the transcriptional regulators SIN3 and RPD3, and a novel gene (SDS3) with similar functions, are involved in transcriptional silencing in S. cerevisiae. Genetics 144, 1343-1353 (1996).
Gregoretti, I., Lee, Y.-M. & Goodson, H. V. Molecular evolution of the histone deacetylase family: functional implications of phylogenetic analysis. Journal of molecular biology 338, 17-31 (2004).
Gao, L., Cueto, M. A., Asselbergs, F. & Atadja, P. Cloning and functional characterization of HDAC11, a novel member of the human histone deacetylase family. Journal of Biological Chemistry 277, 25748-25755 (2002).
Wu, K., Tian, L., Malik, K., Brown, D. & Miki, B. Functional analysis of HD2 histone deacetylase homologues in Arabidopsis thaliana. The Plant Journal 22, 19-27 (2000).
Scher, M. B., Vaquero, A. & Reinberg, D. SirT3 is a nuclear NAD+-dependent histone deacetylase that translocates to the mitochondria upon cellular stress. Genes & development 21, 920-928 (.2007).
Hnisz, D., Schwarzm√°ller, T. & Kuchler, K. Transcriptional loops meet chromatin: a dual, Äêlayer network controls white, Äìpaque switching in Candida albicans. Molecular microbiology 74, 1-15 (2009).
Landry, J. et al. The silencing protein SIR2 and its homologs are NAD-dependent protein deacetylases. Proceedings of the National Academy of Sciences 97, 5807-5811 (2000).
Wilson, J. M., Le, V. Q., Zimmerman, C., Marmorstein, R. & Pillus, L. Nuclear export modulates the cytoplasmic Sir2 homologue Hst2. EMBO reports 7, 1247-1251 (2006).
Gertz, M. & Steegborn, C. Function and regulation of the mitochondrial Sirtuin isoform Sirt5 in Mammalia. Biochimica et Biophysica Acta (BBA)-Proteins and Proteomics 1804, 1658-1665 (2010).
Zhu, A. Y. et al. Plasmodium falciparum Sir2A preferentially hydrolyzes medium and long chain fatty acyl lysine. ACS chemical biology 7,155-159 (2011).
Tennen, R. I., Berber, E. & Chua, K. F. Functional dissection of SIRT6: identification of domains that regulate histone deacetylase activity and chromatin localization. Mechanisms of ageing and development 131, 185-192 (2010).

TABLE 10
Histone Methyltransferase (HMT) Effector Domains

| | | Substrate | | | Full | Selected | Final | |
|---|---|---|---|---|---|---|---|---|
| Subtype/ | | (if | Modification | | size | truncation | size | Catalytic |
| Complex | Name | known) | (if known) | Organism | (aa) | (aa) | (aa) | domain |
| SET | NUE | H2B, | — | C. trachomatis | 219 | 1-219 | 219 | — |
| | | H3, H4 | | | | (Pennini) | | |
| SET | vSET | — | H3K27me3 | P. bursaria | 119 | 1-119 | 119 | 4-112: |
| | | | | chlorella virus | | (Mujtaba) | | SET2 |
| SUV39 | EHMT2/G9A | H1.4K2, | H3K9me1/2, | M. musculus | 1263 | 969-1263 | 295 | 1025-1233: |
| family | | H3K9, | H1K25me1 | | | (Tachibana) | | preSET, SET, |
| | | H3K27 | | | | | | postSET |
| SUV39 | SUV39H1 | — | H3K9me2/3 | H. sapiens | 412 | 79-412 | 334 | 172-412: |
| | | | | | | (Snowden) | | preSET, SET, |
| | | | | | | | | postSET |
| Suvar3-9 | dim-5 | — | H3K9me3 | N. crassa | 331 | 1-331 | 331 | 77-331: |
| | | | | | | (Rathert) | | preSET, SET, |
| | | | | | | | | postSET |
| Suvar3-9 | KYP | — | H3K9me1/2 | A. thaliana | 624 | 335-601 | 267 | — |
| (SUVH | | | | | | | (Jackson) | |
| subfamily) | | | | | | | | |
| Suvar3-9 | SUVR4 | H3K9me1 | H3K9me2/3 | A. thaliana | 492 | 180-492 | 313 | 192-462: |
| (SUVR | | | | | | | (Thorstensen) | preSET, SET, |
| subfamily) | | | | | | | | postSET |
| Suvar4-20 | SET4 | — | H4K20me3 | C. elegans | 288 | 1-288 | 288 | — |
| | | | | | | (Vielle) | | |
| SET8 | SET1 | — | H4K20me1 | C. elegans | 242 | 1-242 | 242 | — |
| | | | | | | (Vielle) | | |
| SET8 | SETD8 | — | H4K20me1 | H. sapiens | 393 | 185-393 | 209 | 256-382: |
| | | | | | | | (Couture) | SET |
| SET8 | TgSET8 | — | H4K20me1/2/3 | T. gondii | 1893 | 1590-1893 | 304 | 1749-1884: |
| | | | | | | (Sautel) | | SET |

Pennini, M. E., Perrinet, S. p., Dautry-Varsat, A. & Subtil, A. Histone methylation by NUE, a novel nuclear effector of the intracellular pathogen Chlamydia trachomatis. PLoS pathogens 6, e1000995 (2010).
Mujtaba, S. et al. Epigenetic transcriptional repression of cellular genes by a viral SET protein. Nature cell biology 10, 1114-1122 (2008).
Tachibana, M., Matsumura, Y., Fukuda, M., Kimura, H. & Shinkai, Y. G9a/GLP complexes independently mediate H3K9 and DNA methylation to silence transcription. The EMBO journal 27, 2681-2690 (2008).
Snowden, A. W., Gregory, P. D., Case, C. C. & Pabo, C. O. Gene-specific targeting of H3K9 methylation is sufficient for initiating repression in vivo. Current biology 12, 2159-2166 (2002).
Rathert, P., Zhang, X., Freund, C., Cheng, X. & Jeltsch, A. Analysis of the substrate specificity of the Dim-5 histone lysine methyltransferase using peptide arrays. Chemistry & biology 15, 5-11 (2008).
Jackson, J. P. et al. Dimethylation of histone H3 lysine 9 is a critical mark for DNA methylation and gene silencing in Arabidopsis thaliana. Chromosoma 112, 308-315 (2004).
Thorstensen, T. et al. The Arabidopsis SUVR4 protein is a nucleolar histone methyltransferase with preference for monomethylated H3K9. Nucleic acids research 34, 5461-5470 (2006).
Vielle, A. et al. H4K20me1 Contributes to Downregulation of X-Linked Genes for C. elegans Dosage Compensation. PLoS Genetics 8, e1002933 (2012).
Couture, J.-F., Collazo, E., Brunzelle, J. S. & Trievel, R. C. Structural and functional analysis of SET8, a histone H4 Lys-20 methyltransferase. Genes & development 19, 1455-1465 (2005).
Sautel, C. l. F. et al. SET8-mediated methylations of histone H4 lysine 20 mark silent heterochromatic domains in apicomplexan genomes. Molecular and cellular biology 27, 5711-5724 (2007).

TABLE 11
Histone Methyltransferase (HMT) Recruiter Effector Domains

| | | Substrate | | | Full | Selected | Final | |
|---|---|---|---|---|---|---|---|---|
| Subtype/ | | (if | Modification | | size | truncation | size | Catalytic |
| Complex | Name | known) | (if known) | Organism | (aa) | (aa) | (aa) | domain |
| — | Hp1a | — | H3K9me3 | M. musculus | 191 | 73-191 | 119 | 121-179: |
| | | | | | | | (Hathaway) | chromoshadow |
| — | PHF19 | — | H3K27me3 | H. sapiens | 580 | (1-250) + | 335 | 163-250: PHD2 |
| | | | | | | GGSG linker | (Baltaré) | |
| | | | | | | (SEQ ID | | |
| | | | | | | NO: 131) + | | |
| | | | | | | (500-580) | | |
| — | NIPP1 | — | H3K27me3 | H. sapiens | 351 | 1-329 (Jin) | 329 | 310-329: EED |

Hathaway, N. A. et al. Dynamics and memory of heterochromatin in living cells. Cell (2012).
Ballaré, C. et al. Phf19 links methylated Lys36 of histone H3 to regulation of Polycomb activity. Nature structural & molecular biology 19, 1257-1265 (2012).
Jin, Q. et al. The protein phosphatase-1 (PP1) regulator, nuclear inhibitor of PP1 (NIPP1), interacts with the polycomb group protein, embryonic ectoderm development (EED), and functions as a transcriptional repressor. Journal of Biological Chemistry 278, 30677-30685 (2003).

TABLE 12
Histone Acetyltransferase Inhibitor Effector Domains

| | | Substrate | | | Full | Selected | Final | |
|---|---|---|---|---|---|---|---|---|
| Subtype/ | | (if | Modification | | size | truncation | size | Catalytic |
| Complex | Name | known) | (if known) | Organism | (aa) | (aa) | (aa) | domain |
| — | SET/TAF-1β | — | — | M. musculus | 289 | 1-289 | 289 | — |
| | | | | | | (Cervoni) | | |

Cervoni, N., Detich, N., Seo, S.-B., Chakravarti, D. & Szyf, M. The oncoprotein Set/TAF-1 [symbol] ≦, an inhibitor of histone acetyltransferase, inhibits active demethylation of DNA, integrating DNA methylation and transcriptional silencing. Journal of Biological Chemistry 277, 25026-25031 (2002)

[0536] Supplementary Sequences

>TALE(Ngn2)-NLS-CRY2
(SEQ ID NO: 132)
MSRTRLPSPPAPSPAFSADSFSDLLRQFDPSLFNTSLFDSLPPFGAHHTEAATG
EWDEVQSGLRAADAPPPTMRVAVTAARPPRAKPAPRRRAAQPSDASPAAQVDLRTLGY
SQQQQEKIKPKVRSTVAQHHEALVGHGFTHAHIVALSQHPAALGTVAVKYQDMIAALP
EATHEAIVGVGKQWSGARALEALLTVAGELRGPPLQLDTGQLLKIAKRGGVTAVEAVH
AWRNALTGAPLNLTPEQVVAIASNNGGKQALETVQRLLPVLCQAHGLTPEQVVAIASN
GGGKQALETVQRLLPVLCQAHGLTPEQVVAIASNNGGKQALETVQRLLPVLCQAHGLT
PEQVVAIASNIGGKQALETVQRLLPVLCQAHGLTPEQVVAIASNIGGKQALETVQRLLPV
LCQAHGLTPEQVVAIASNGGGKQALETVQRLLPVLCQAHGLTPEQVVAIASNNGGKQA
LETVQRLLPVLCQAHGLTPEQVVAIASNIGGKQALETVQRLLPVLCQAHGLTPEQVVAI
ASNGGGKQALETVQRLLPVLCQAHGLTPEQVVAIASNNGGKQALETVQRLLPVLCQAH
GLTPEQVVAIASNIGGKQALETVQRLLPVLCQAHGLTPEQVVAIASNGGGKQALETVQR
LLPVLCQAHGLTPEQVVAIASNIGGKQALETVQRLLPVLCQAHGLTPEQVVAIASNIGGK
QALETVQRLLPVLCQAHGLTPEQVVAIASNGGGKQALETVQRLLPVLCQAHGLTPEQV
VAIASNIGGKQALETVQRLLPVLCQAHGLTPEQVVAIASHDGGRPALESIVAQLSRPDPA
LAALTNDHLVALACLGGRPALDAVKKGLPHAPALIKRTNRRIPERTSHRVADHAQVVR
VLGFFQCHSHPAQAFDDAMTQFGMSRHGLLQLFRRVGVTELEARSGTLPPASQRWDRI
LQASGMKRAKPSPTSTQTPDQASLHAFADSLERDLDAPSPMHEGDQTRASASPKKKRK
VEASKMDKKTIVWFRRDLRIEDNPALAAAAHEGSVFPVFIWCPEEEGQFYPGRASRWW
MKQSLAHLSQSLKALGSDLTLIKTHNTISAILDCIRVTGATKVVFNHLYDPVSLVRDHTV
KEKLVERGISVQSYNGDLLYEPWEIYCEKGKPFTSFNSYWKKCLDMSIESVMLPPPWRL
MPITAAAEAIWACSIEELGLENEAEKPSNALLTRAWSPGWSNADKLLNEFIEKQLIDYAK
NSKKVVGNSTSSLLSPYLHFGEISVRHVFQCARMKQIIWARDKNSEGEESADLFLRGIGLR
EYSRYICFNFPFTHEQSLLSHLRFFPWDADVDKFKAWRQGRTGYPLVDAGMRELWATG
WMHNRIRVIVSSFAVKFLLLPWKWGMKYFWDTLLDADLECDILGWQYISGSIPDGHEL
DRLDNPALQGAKYDPEGEYIRQWLPELARLPTEWIHHPWDAPLTVLKASGVELGTNYA
KPIVDIDTARELLAKAISRTREAQIMIGAAPDEIVADSFEALGANTIKEPGLCPSVSSNDQ
QVPSAVRYNGSKRVKPEEEEERDMKKSRGFDERELFSTAESSSSSSVFFVSQSCSLASEG
KNLEGIQDSSDQITTSLGKNG
>TALE(Ngn2)-NLS-CRY2PHR
(SEQ ID NO: 133)
MSRTRLPSPPAPSPAFSADSFSDLLRQFDPSLFNTSLFDSLPPFGAHHTEAATG
EWDEVQSGLRAADAPPPTMRVAVTAARPPRAKPAPRRRAAQPSDASPAAQVDLRTLGY
SQQQQEKIKPKVRSTVAQHHEALVGHGFTHAHIVALSQHPAALGTVAVKYQDMIAALP
EATHEAIVGVGKQWSGARALEALLTVAGELRGPPLQLDTGQLLKIAKRGGVTAVEANH
AWRNALTGAPLNLTPEQVVAIASNNGGKQALETVQRLLPVLCQAHGLTPEQVVAIASN
GGGKQALETVQRLLPVLCQAHGLTPEQVVAIASNNGGKQALETVQRLLPVLCQAHGLT
PEQVVAIASNIGGKQALETVQRLLPVLCQAHGLTPEQVVAIASNIGGKQALETVQRLLPV
LCQAHGLTPEQVVAIASNGGGKQALETVQRLLPVLCQAHGLTPEQVVAIASNNGGKQA
LETVQRLLPVLCQAHGLTPEQVVAIASNIGGKQALETVQRLLPVLCQAHGLTPEQVVAI
ASNGGGKQALETVQRLLPVLCQAHGLTPEQVVAIASNNGGKQALETVQRLLPVLCQAH
GLTPEQVVAIASNIGGKQALETVQRLLPVLCQAHGLTPEQVVAIASNGGGKQALETVQR
LLPVLCQAHGLTPEQVVAIASNIGGKQALETVQRLLPVLCQAHGLTPEQVVAIASNIGGK
QALETVQRLLPVLCQAHGLTPEQVVAIASNGGGKQALETVQRLLPVLCQAHGLTPEQV
VAIASNIGGKQALETVQRLLPVLCQAHGLTPEQVVAIASHDGGRPALESIVAQLSRPDPA
LAALTNDHLVALACLGGRPALDAVKKGLPHAPALIKRTNRRIPERTSHRVADHAQVVR
VLGFFQCHSHPAQAFDDAMTQFGMSRHGLLQLFRRVGVTELEARSGTLPPASQRWDRI
LQASGMKRAKPSPTSTQTPDQASLHAFADSLERDLDAPSPMHEGDQRASASPKKKRK
VEASKMDKKTIVWFRRDLRIEDNPALAAAAHEGSVFPVFIWCPEEEGQFYPGRASRWW
MKQSLAHLSQSLKALGSDLTLIKTHNTISAILDCIRVTGATKVVFNHLYDPVSLVRDHTV
KEKLVERGISVQSYNGDLLYEPWEIYCEKGKPFTSFNSYWKKCLDMSIESVMLPPPWRL
MPITAAAEAIWACSIEELGLENEAEKPSNALLTRAWSPGWSNADKLLNEFIEKQLIDYAK
NSKKVVGNSTSLLSPYLHFGEISVRHVFQCARMKQIIWARDKNSEGEESADLFLRGIGLR
EYSRYICFNFPFTHEQSLLSHLRFFPWDADVDKFKAWRQGRTGYPLVDAGMRELWATG
WMHNRIRVIVSSFAVKFLLLPWKWGMKYFWDTLLDADLECDILGWQUISGSIPDGHEL
DRLDNPALQDAKYDPEGEYIRQWLPELARLPTEWIHHPWDAPLTVLKASGVELGTNYA
KPIVDIDTARELLAKAISRTREAQIMIGAAP
>CIB1-NLS-VP64_2A_GFP
(SEQ ID NO: 134)
MNGAIGGDLLLNFPDMSVLERQRAHLKYLNPTFDSPLAGFFADSSMITGGEM
DSYLSTAGLNLPMMYGETTVEGDSRLSISPETTLGTGNFKKRKFDTETKDCNEKKKKMT
MNRDDLVEEGEEEKSKITEQNNGSTKSIKKMKHKAKKEENNFSNDSSKVTKELEKTDYI
HVRARRGQATDSHSIAERVRREKISERMKFLQDLVPGCDKITGKAGMLDEIINYVQSLQ
RQIEFLSMKLAIVNPRPDFDMDDIFAKEVASTPMTVVPSPEMVLSGYSHEMVHSGYSSE
MVNSGYLHVNPMQQVNTSSDPLSCFNNGEAPSMWDSHVQNLYGNLGVASPKKKRKV
EASGSGRADALDDFDLDMLGSDALDDFDLDMLGSDALDDFDLDMLGSDALDDFDLDM
LINSRGSGEGRGSLLTCGDVEENPGPVSKGEELFTGVVPILVELDGDVNGHKFSVSGEGE
GDATYGKLTLKFICTTGKLPVPWPTLVTTLTYGVQCFSRYPDHMKQHDFFKSAMPEGY
VQERTIFFKDDGNYKTRAEVKFEGDTLVNRIELKGIDFKEDGNILGHKLEYNYNSHNVYI
MADKQKNGIKVNFKIRHNIEDGSVQLADHYQQNTPIGDGPVLLPDNHYLSTQSALSKDP
NEKRDHMVLLEFVTAAGITLGMDELYK
>CIBN-NLS-VP64_2a_GFP
(SEQ ID NO: 135)
MNGAIGGDLLLNFPDMSVLERQRAHLKYLNPTFDSPLAGFFADSSMITGGEM
DSYLSTAGLNLPMMYGETTVEGDSRLSISPETTLGTGNFKKRKFDTETKDCNEKKKKMT
MNRDDLVEEGEEEKSKITEQNNGSTKSIKKMKHKAKKEENNFSNDSSKVTKELEKTDYI
ASPKKKRKVEASGSGRADALDDFDLDMLGSDALDDFDLDMLGSDALDDFDLDMLGSD
ALDDFDLDMLINSRGSGEGRGSLLTCGDVEENPGPVSKGEELFTGVVPILVELDGDVNG
HKFSVSGEGEGDATYGKLTLKFICTTGKLPVPWPTLVTTLTYGVQCFSRYPDHMKQHDF
FKSAMPEGYVQERTIFFKDDGNYKTRAEVKFEGDTLVNRIELKGIDFKEDGNILGHKLE
YNYNSHNVYIMADKQKNGIKVNFKIRHNIEDGSVQLADHYQQNTPIGDGPVLLPDNHY
LSTQSALSKDPNEKRDHMVLLEFVTAAGITLGMDELYK
>CIB1-NLS-VP16_2A_GFP
(SEQ ID NO: 136)
MNGAIGGDLLLNFPDMSVLERQRAHLKYLNPTFDSPLAGFFADSSMITGGEM
DSYLSTAGLNLPMMYGETTVEGDSRLSISPETTLGTGNFKKRKFDTETKDCNEKKKKMT
MNRDDLVEEGEEEKSKITEQNNGSTKSIKKMKHKAKKEENNFSNDSSKVTKELEKTDYI
HVRARRGQATDSHSIAERVRREKISERMKFLQDLVPGCDKITGKAGMLDEIINYVQSLQ
RQIEFLSMKLAIVNPRPDFDMDDIFAKEVASTPMTVVPSPEMVLSGYSHEMVHSGYSSE
MVNSGYLHVNPMQQVNTSSDPLSCFNNGEAPSMWDSHVQNLYGNLGVASPKKKRKV
EASAPPTDVSLGDELHLDGEDVAMAHADALDDFDLDMLGDGDSPGPGFTPHDSAPYG
ALDMADFEFEQMFTDALGIDEYGGEFPGIRRSRGSGEGRGSLLTCGDVEENPGPVSKGE
ELFTGVVPILVELDGDVNGHKFSVSGEGEGDATYGKLTLKFICTTGKLPVPWPTLVTTLT
YGVQCFSRYPDHMKQHDFFKSAMPEGYVQERTIFFKDDGNYKTRAEVKFEGDTLVNRI
ELKGIDFKEDGNILGHKLEYNYNSHNVYIMADKQKNGIKVNFKIRHNIEDGSVQLADHY
QQNTPIGDGPVLLPDNHYLSTQSALSKDPNEKRDHMVLLEFVTAAGITLGMDELYK
>CIB1-NLS-p65_2A_GFP
(SEQ ID NO: 137)
MNGAIGGDLLLNFPDMSVLERQRAHLKYLNPTFDSPLAGFFADSSMITGGEM
DSYLSTAGLNLPMMYGETTVEGDSRLSISPETTLGTGNFKKRKFDTETKDCNEKKKKMT
MNRDDLVEEGEEEKSKITEQNNGSTKSIKKMKHKAKKEENNFSNDSSKVTKELEKTDYI
HVRARRGQATDSHSIAERVRREKISERMKFLQDLVPGCDKITGKAGMLDEIINYVQSLQ
RQIEFLSMKLAIVNPRPDFDMDDIFAKEVASTPMTVVPSPEMVLSGYSHEMVHSGYSSE
MVNSGYLHVNPMQQVNTSSDPLSCFNNGEAPSMWDSHVQNLYGNLGVASPKKKRKV
EASPSGQISNQALALAPSSAPVLAQTMVPSSAMVPLAQPPAPAPVLTPGPPQSLSAPVPK
STQAGEGTLSEALLHLQFDADEDLGALLGNSTDPGVFTDLASVDNSEFQQLLNQGVSMS
HSTAEPMLMEYPEAITRLVTGSQRPPDPAPTPLGTSGLPNGLSGDEDFSSIADMDFSALLS
QISSSGQSRGSGEGRGSLLTCGDVEENPGPVSKGEELFTGVVPILVELDGDVNGHKFSVS
GEGEGDATYGKLTLKFICTTGKLPVPWPTLVTTLTYGVSCFSRYPDHMKQHDFFKSAM
PEGYVQERTIFFKDDGNYKTRAEVKFEGDTLVNRIELKGIDFKEDGNILGHKLEYNYNS
HNVYIMADKQKNGIKVNFKIRHNIEDGSVQLADHYQQNTPIGDGPVLLPDNHYLSTQSA
LSKDPNEKRDHMVLLEFVTAAGITLGMDELYK
.>HA-TALE(12mer)-NLS-VP64_2A_GFP
(SEQ ID NO: 138)
MYPYDVPDYAVDLRTLGYSQQQQEKIKPKVRSTVAQHHEALVGHGFTHAHI
VALSQHPAALGTVAVKYQDMIAALPEATHEAIVGVGKQWSGARALEALLTVAGELRGP
PLQLDTGQLLKIAKRGGVTAVEAVHAWRNALTGAPLNLTPEQVVAIASXXGGKQALET
VQRLLPVLCQAHGLTPEQVVAIASXXGGKQALETVQRLLPVLCQAHGLTPEQVVAIASX
XGGKQALETVQRLLPVLCQAHGLTPEQVVAIASXXGGKQALETVQRLLPVLCQAHGLT
PEQVVAIASXXGGKQALETVQRLLPVLCQAHGLTPEQVVAIASXXGGKQALETVQRLLP
VLCQAHGLTPEQVVAIASXXGGKQALETVQRLLPVLCQAHGLTPEQVVAIASXXGGKQ
ALETVQRLLPVLCQAHGLTPEQVVAIASXXGGKQALETVQRLLPVLCQAHGLTPEQVV
AIASXXGGKQALETVQRLLPVLCQAHGLTPEQVVAIASXXGGKQALETVQRLLPVLCQ
AHGLTPEQVVAIASXXGGKQALETVQRLLPVLCQAHGLTPEQVVAIASXXGGRPALESI
VAQLSRPDPALAALTNDHLVALACLGGRPALDAVKKGLPHAPALIKRTNRRIPERTSHR
VAASPKKKRKVEASGSGRADALDDFDLDMLGSDALDDFDLDMLGSDALDDFDLDMLG
SDALDDFDLDMLINSRGSGEGRGSLLTCGDVEENPGPVSKGEELFTGVVPILVELDGDV
NGHKFSVSGEGEGDATYGKLTLKFICTTGKLPVPWPTLVTTLTYGVQCFSRYPDHMKQ
HDFFKSAMPEGYVQERTIFFKDDGNYKTRAEVKFEGDTLVNRIELKGIDFKEDGNILGH
KLEYNYNSHNVYIMADKQKNGIKVNFKIRHNIEDGSVQLADHYQQNTPIGDGPVLLPDN
HYLSTQSALSKDPNEKRDHMVLLEFVTAAGITLGMDELYK
>HA-TALE(12mer)-NLS-SID4X_2A_phiLOV2.1
(SEQ ID NO: 139)
MYPYDVPDYAVDLRTLGYSQQQQEKIKPKVRSTVAQHHEALVGHGFTHAHI
VALSQHPAALGTVAVKYQDMIAALPEATHEAIVGVGKQWSGARALEALLTVAGELRGP
PLQLDTGQLLKIAKRGGVTAVEAVHAWRNALTGAPLNLTPEQVVAIASXXGGKQALET
VQRLLPVLCQAHGLTPEQVVAIASXXGGKQALETVQRLLPVLCQAHGLTPEQVVAIASX
XGGKQALETVQRLLPVLCQAHGLTPEQVVAIASXXGGKQALETVQRLLPVLCQAHGLT
PEQVVAIASXXGGKQALETVQRLLPVLCQAHGLTPEQVVAIASXXGGKQALETVQRLLP
VLCQAHGLTPEQVVAIASXXGGKQALETVQRLLPVLCQAHGLTPEQVVAIASXXGGKQ
ALETVQRLLPVLCQAHGLTPEQVVAIASXXGGKQALETVQRLLPVLCQAHGLTPEQVV
AIASXXGGKQALETVQRLLPVLCQAHGLTPEQVVAIASXXGGKQALETVQRLLPVLCQ
AHGLTPEQVVAIASXXGGKQALETVQRLLPVLCQAHGLTPEQVVAIASXXGGRPALESI
VAQLSRPDPALAALTNDHLVALACLGGRPALDAVKKGLPHAPALIKRTNRRIPERTSHR
VAASPKKKRKVEASPKKKRKVEASGSGMNIQMLLEAADYLERREREAEHGYASMLPG
SGMNIQMLLEAADYLERREREAEHGYASMLPGSGMNIQMLLEAADYLERREREAEHG
YASMLPGSGMNIQMLLEAADYLERREREAEHGYASMLPSRSRGSGEGRGSLLTCGDVE
ENPGPIEKSFVITDPRLPDYPIIFASDGFLELTEYSREEIMGRNARFLQGPETDQATVQKIR
DAIRDQRETTVQLINYTKSGKKFWNLLHLQPVRDRKGGLQYFIGVQLVGSDHV
>HA-TALE(12mer)-NLS-CIB1
(SEQ ID NO: 140)
MYPYDVPDYAVDLRTLGYSQQQQEKIKPKVRSTVAQHHEALVGHGFTHAHI
VALSQHPAALGTVAVKYQDMIAALPEATHEAIVGVGKQWSGARALEALLTVAGELRGP
PLQLDTGQLLKIAKRGGVTAVEAVHAWRNALTGAPLNLTPEQVVAIASXXGGKQALET
VQRLLPVLCQAHGLTPEQVVAIASXXGGKQALETVQRLLPVLCQAHGLTPEQVVAIASX
XGGKQALETVQRLLPVLCQAHGLTPEQVVAIASXXGGKQALETVQRLLPVLCQAHGLT
PEQVVAIASXXGGKQALETVQRLLPVLCQAHGLTPEQVVAIASXXGGKQALETVQRLLP
VLCQAHGLTPEQVVAIASXXGGKQALETVQRLLPVLCQAHGLTPEQVVAIASXXGGKQ
ALETVQRLLPVLCQAHGLTPEQVVAIASXXGGKQALETVQRLLPVLCQAHGLTPEQVV
AIASXXGGKQALETVQRLLPVLCQAHGLTPEQVVAIASXXGGKQALETVQRLLPVLCQ
AHGLTPEQVVAIASXXGGKQALETVQRLLPVLCQAHGLTPEQVVAIASXXGGRPALESI
VAQLSRPDPALAALTNDHLVALACLGGRPALDAVKKGLPHAPALIKRTNRRIPERTSHR
VAASPKKKRKVEASNGAIGGDLLLNFPDMSVLERQRAHLKYLNPTEDSPLAGFFADSSM
ITGGEMDSYLSTAGLNLPMMYGETTVEGDSRLSISPETTLGTGNFKKRKFDTETKDCNE
KKKKMTMNRDDLVEEGEEEKSKITEQNNGSTKSIKKMKHKAKKEENNFSNDSSKVTKE
LEKTDYIHVRARRGQATDSHSIAERVRREKISERMKFLQDLVPGCDKITGKAGMLDEIIN
YVQSLQRQIEFLSMKLAIVNPRPDFDMDDIFAKEVASTPMTVVPSPEMVLSGYSHEMVH
SGYSSEMVNSGYLHVNPMQQVNTSSDPLSCFNNGEAPSMWDSHVQNLYGNLGV
>CRY2PHR-NLS-VP64_2A_GFP
(SEQ. ID NO: 141)
MKMDKKTIVWFRRDLRIEDNPALAAAAHEGSVFPVFIWCPEEEGQFYPGRAS
RWWMKQSLAHLSQSLKALGSDLTLIKTHNTISAILDCIRVTGATKVVFNHLYDPVSLVR
DHTVKEKLVERGISVQSYNGDLLYEPWEIYCEKGKPFTSFNSYWKKCLDMSIESVMLPP
PWRLMPITAAAEAIWACSIEELGLENEAEKPSNALLTRAWSPGWSNADKLLNEFIEKQLI
DYAKNSKKVVGNSTSLLSPYLHFGEISVRHVFQCARMKQIIWARDKNSEGEESADLFLR
GIGLREYSRYICFNFPFTHEQSLLSHLRFFPWDADVDKFKAWRQGRTGYPLVDAGMREL
WATGWMHNRIRVIVSSFAVKFLLLPWKWGMKYFWDTLLDADLECDILGWQYISGSIPD
GHELDRLDNPALQGAKYDPEGEYIRQWLPELARLPTEWIHHPWDAPLTVLKASGVELG
TNYAKPIVDIDTARELLAKAISRTREAQIMIGAAPASPKKKRKVEASGSGRADALDDFDL
DMLGSDALDDFDLDMLGSDALDDFDLDMLGSDALDDFDLDMLINSRGSGEGRGSLLTC
GDVEENPGPVSKGEELFTGVVPILVELDGDVNGHKFSVSGEGEGDATYGKLTLKFICTT
GKLPVPWPTLVTTLTYGVQCFSRYPDHMKQHDFFKSAMPEGYVQERTIFFKDDGNYKT
RAEVKFEGDTLVNRIELKGIDFKEDGNILGHKLEYNYNSHNVYIMADKQKNGIKVNFKI
RHNIEDGSVQLADHYQQNTPIGDGPVLLPDNHYLSTQSALSKDPNEKRDHMVLLEFVTA
AGITLGMDELYKV
>(CRY2PHR-NLS-SID4X_2A_phiLOV2.1
(SEQ ID NO: 142)
MKMDKKTIVWFRRDLRIEDNPALAAAAHEGSVFPVFIWCPEEEGQFYPGRAS
RWWMKQSLAHLSQSLKALGSDLTLIKTHNTISAILDCIRVTGATKVVFNHLYDPVSLVR
DHTVKEKLVERGISVQSYNGDLLYEPWEIYCEKGKPFTSFNSYWKKCLDMSIESVMLPP
PWRLMPITAAAEAIWACSIEELGLENEAEKPSNALLTRAWSPGWSNADKLLNEFIEKQLI
DYAKNSKKVVGNSTSLLSPYLHFGEISVRHVFQCARMKQIIWARDKNSEGEESADLFLR
GIGLREYSRVICFNFPFTHEQSLLSHLRFFPWDADVDKFKAWRQGRTGYPLVDAGMREL
WATGWMHNRIRVIVSSFAVKFLLLPWKWGMKYFWDTLLDADLECDILGWQYISGSIPD
GHELDRLDNPALQGAKYDPEGEYIRQWLPELARLPTEWIHHPWDAPLTVLKASGVELG
TNYAKPIVDIDTARELLAKAISRTREAQIMIGAAPASPKKKRKVEASGSGMNIQMLLEAA
DYLERREREAEHGYASMLPGSGMNIQMLLEAADYLERREREAEHGYASMLPGSGMNIQ
MLLEAADYLERREREAEHGYASMLPGSGMNIQMLLEAADYLERREREAEHGYASMLP
SRSRGSGEGRGSLLTCGDVEENPGPIEKSFVITDPRLPDYPIIFASDGFLELTEYSREEIMG
RNARFLQGPETDQATVQKIRDAIRDQRETTVALINYTKSGKKFWNLLHLQPVRDRKGGL
QYFIGVQLVGSDHV
TALE(KLF4)-NLS-CRY2PHR
(SEQ ID NO: 143)
MSRTRLPSPPAPSPAFSADSFSDLLRQFDPSLFNTSLFDSLPPFGAHHTEAATG
EWDEVQSGLRAADAPPPTMRVAVTAARPPRAKPAPRRRAAQPSDASPAAQVDLRTLGY
SQQQQEKIKPKVRSTVAQHHEALVGHGFTHAHIVALSQHPAALGTVAVKYQDMIAALP
EATHEAIVGVGKQWSGARALEALLTVAGELRGPPLQLDTGQLLKIAKRGGVTAVEAVH
AWRNALTGAPLNLTPEQVVAIASNGGGKQALETVQRLLPVLCQAHGLTPEQVVAIASH
DGGKQALETVQRLLPVLCQAHGLTPEQVVAIASNGGGKQALETVQRLLPVLCQAHGLT
PEQVVAIASNGGGKQALETVQRLLPVLCQAHGLTPEQVVAIASNIGGKQALETVQRLLP
VLCQAHGLTPEQVVAIASHDGGKQALETVQRLLPVLCQAHGLTPEQVVAIASNGGGKQ
ALETVQRLLPVLCQAHGLTPEQVVAIASNGGGKQALETVQRLLPVLCQAHGLTPEQVV
AIASNIGGKQALETVQRLLPVLCQAHGLTPEQVVAIASNGGGKQALETVQRLLPVLCQA
HGLTPEQVVAIASNIGGKQALETVQRLLPVLCQAHGLTPEQVVAIASNIGGKQALETVQ
RLLPVLCQAHGLTPEQVVAIASHDGGRPALESIVAQLSRPDPALAALTNDHLVALACLG
GRPALDAVKKGLPHAPALIKRTNRRIPERTSHRVADHAQVVRVLGFFQCHSHPAQAFDD
AMTQFGMSRHGLLQLFRRVGVTELEARSGTLPPASQRWDRILQASGMKRAKPSPTSTQ
TPDQASLHAFADSLERDLDAPSPMHEGDQTRASASPKKKRKVEASKMDKKTIVWFRRD
LRIEDNAPALAAAAHEGSVFPVFIWCPEEEGQFYPGRASRWWMKQSLAHLSQSLKALGS
DLTLIKTHNTISAILDCIRVTGATKVVFNHLYDPVSLVRDHTVKEKLVERGISVQSYNGD
LLYEPWEIYCEKGKPFTSFNSYWKKCLDMSIESVMLPPPWRLMPITAAAEAIWACSIEEL
GLENEAEKPSNALLTRAWSPGWSNADKLLNEFIEKQLIDYAKNSKKVVGNSTSLLSPYL
HFGEISVRHVFQCARMKQIIWARDKNSEGEESADLFLRGIGLREYSRYICFNFPFTHEQSL
LSHLRFFPWDADVDKFKAWRQGRTGYPLVDAGMRELWATGWMHNRIRVIVSSFAVKF
LLLPWKWGMKYFWDTLLDADLECDILGWQYISGSIPDGHELDRLDNPALQGAKYDPEG
EYIRQWLPELARLPTEWIHHPWDAPLTVLKASGVELGTNYAKPIVDIDTARELLLAKAISR
TREAQIMIGAAP
>HA-NLS-TALE(p11,N136)-SID
(SEQ ID NO: 144)
MYPYDVPDYASPKKKRKVEASVDLRTLGYSQQQQEKIKPKVRSTVAQHHEA
LVGHGFTHAHIVALSQHPAALGTVAVKYQDMIAALPEATHEAIVGVGKQWSGARALEA
LLTVAGELRGPPLQLDTGQLLKIAKRGGVTAVEAVHAWRNALTGAPLNLTPEQVVAIA
SNNGGKQALETVQRLLPVLCQAHGLTPEQVVAIASHDGGKQALETVQRLLPVLCQAHG
LTPEQVVAIASHDGGKQALETVQRLLPVLCQAHGLTPEQVVAIASNGGGKQALETVQR
LLPVLCQAHGLTPEQVVAIASNNGGKQALETVQRLLPVLCQAHGLTPEQVVAIASHDGG
KQALETVQRLLPVLCQAHGLTPEQVVAIASHDGGKQALETVQRLLPVLCQAHGLTPEQ
VVAIASHDGGKQALETVQRLLPVLCQAHGLTPEQVVAIASNGGGKQALETVQRLLPVL
CQAHGLTPEQVVAIASHDGGKQALETVQRLLPVLCQAHGLTPEQVVAIASHDGGKQAL
ETVQRLLPVLCQAHGLTPEQVVAIASNIGGKQALETVQRLLPVLCQAHGLTPEQVVAIA
SNNGGKQALETVQRLLPVLCQAHGLTPEQVVAIASNNGGKQALETVQRLLPVLCQAHG
LTPEQVVAIASHDGGKQALETVQRLLPVLCQAHGLTPEQVVAIASNGGGKQALETVQR
LLPVLCQAHGLTPEQVVAIASHDGGKQALETVQRLLPVLCQAHGLTPEQVVAIASHDGG
KQALETVQRLLPVLCQAHGLTPEQVVAIASHDGGRPALESIVAQLSRPDPALAALTNDH
LVALACLGGRPALDAVKKGLPHAPALIKRTNRRIPERTSHRVADHAQVVRVLGFFQCHS
HPAQAFDDAMTQFGMSRHGLLQLFRRVGVTELEARSGTLPPASQRWDRILQASGMKRA
KPSPTSTQTPDQASLHAFADSLERDLDAPSPMHEGDQTRASASGSGMNIQMLLEAADYL
ERREREAEHGYASMLP.
>HA-NLS-TALE(p11, N136)-SID4X
(SEQ ID NO: 145)
MYPYDVPDYASPKKKRKVEASVDLRTLGYSQQQQEKIKPKVRSTVAQHHEA
LVGHGFTHAHIVALSQHPAALGTVAVKYQDMIAALPEATHEAIVGVGKQWSGARALEA
LLTVAGELRGPPLQLDTGQLLKIAKRGGVTAVEAVHAWRNALTGAPLNLTPEQVVAIA
SNNGGKQALETVQRLLPVLCQAHGLTPEQVVAIASHDGGKQALETVQRLLPVLCQAHG
LTPEQVVAIASHDGGKQALETVQRLLPVLCQAHGLTPEQVVAIASNGGGKQALETVQR
LLPVLCQAHGLTPEQVVAIASNNGGKQALETVQRLLPVLCQAHGLTPEQVVAIASHDGG
KQALETVQRLLPVLCQAHGLTPEQVVAIASHDGGKQALETVQRLLPVLCQAHGLTPEQ
VVAIASHDGGKQALETVQRLLPVLCQAHGLTPEQVVAIASNGGGKQALETVQRLLPVL
CQAHGLTPEQVVAIASHDGGKQALETVQRLLPVLCQAHGLTPEQVVAIASHDGGKQAL
ETVQRLLPVLCQAHGLTPEQVVAIASNIGGKQALETVQRLLPVLCQAHGLTPEQVVAIA
SNNGGKQALETVQRLLPVLCQAHGLTPEQVVAIASNNGGKQALETVQRLLPVLCQAHG
LTPEQVVAIASHDGGKQALETVQRLLPVLCQAHGLTPEQVVAIASNGGGKQALETVQR
LLPVLCQAHGLTPEQVVAIASHDGGKQALETVQRLLPVLCQAHGLTPEQVVAIASHDGG
KQALETVQRLLPVLCQAHGLTPEQVVAIASHDGGRPALESIVAQLSRPDPALAALTNDH
LVALACLGGRPALDAVKKGLPHAPALIKRTNRRIPERTSHRVADHAQVVRVLGFFQCHS
HPAQAFDDAMTQFGMSRHGLLQLFRRVGVTELEARSGTLPPASQRWDRILQASGMKRA
KPSPTSTQTPDQASLHAFADSLERDLDAPSPMHEGDQTRASASGSGMNIQMLLEAADYL
ERREREAEHGYASMLPGSGNMIQMLLEAADYLERREREAEHGYASMLPGSGMNIQML
LEAADYLERREREAEHGYASMLPGSGMNIQMLLEAADYLERREREAEHGYASMLPSR
>HA-TALE(ng2, C63)-GS-cib1-mutNLS
(SEQ ID NO: 146)
YPYDVPDYASRTRLPSPPAPSPAFSADSFSDLLRQFDPSLFNTSLFDSLPPFGA
HHTEAATGEWDEVQSGLRAADAPPPTMRVAVTAARPPRAKPAPRRRAAQPSDASPAA
QVDLRTLGYSQQQQEKIKPKVRSTVAQHHEALVGHGFTHAHIVALSQHPAALGTVAVK
YQDMIAALPEATHEAIVGVGKQWSGARALEALLTVAGELRGPPLQLDTGQLLKIAKRG
GVTAVEAVHAWRNALTGAPLNLTPEQVVAIASNGGGKQALETVQRLLPVLCQAHGLTP
EQVVAIASNNGGKQALETVQRLLPVLCQAHGLTPEQVVAIASNIGGKQALETVQRLLPV
LCQAHGLTPEQVVAIASNIGGKQALETVQRLLPVLCQAHGLTPEQVVAIASNGGGKQAL
ETVQRLLPVLCQAHGLTPEQVVAIASNNGGKQALETVQRLLPVLCQAHGLTPEQVVAIA
SNIGGKQALETVQRLLPVLCQAHGLTPEQVVAIASNGGGKQALETVQRLLPVLCQAHGL
TPEQVVAIASNNGGKQALETVQRLLPVLCQAHGLTPEQVVAIASNIGGKQALETVQRLL
PVLCQAHGLTPEQVVAIASNGGGKQALETVQRLLPVLCQAHGLTPEQVVAIASNIGGKQ
ALETVQRLLPVLCQAHGLTPEQVVAIASNIGGKQALETVQRLLPVLCQAHGLTPEQVVA
IASNGGGKQALETVQRLLPVLCQAHGLTPEQVVAIASNIGGKQALETVQRLLPVLCQAH
GLTPEQVVAIASHDGGRPALESIVAQLSRPDPALAALTNDHLVALACLGGRPALDAVKK
GLPHAPALIKRTNRRIPERTSHRVAASGGGGSGGGGSNGAIGGDLLLNFPDMSVLERQR
AHLKYLNPTFDSPLAGFFADSSMITGGEMDSYLSTAGLNLPMMYGETTVEGDSRLSISPE
TTLGTGNFKAAKFDTETKDCNEAAKKMTMNRDDLVEEGEEEKSKITEQNNGSTKSIKK
MKHKAKKEENNFSNDSSKVTKELEKTDYIHVRARRGQATDSHSIAERVRREKISERMKF
LQDLVPGCDKITGKAGMLDEIINYVQSLQRQIEFLSMKLAIVNPRPDFDMDDIFAKEVAS
TPMTVVPSPEMVLSGYSHEMVHSGYSSEMVNSGYLHVNPMQQVNTSSDPLSCFNNGEA
PSMWDSHVQNLYGNLGV
>HA-TALE(ng2, C63)-wNES-cib1-mutNLS
(SEQ ID NO: 147)
YPYDVPDYASRTRLPSPPAPSPAFSADSFSDLLRQFDPSLFNTSLFDSLPPFGA
HHTEAATGEWDEVQSGLRAADAPPPTMRVAVTAARPPRAKPAPRRRAAQPSDASPAA
QVDLRTLGYSQQQQEKIKPKVRSTVAQHHEALVGHGFTHAHIVALSQHPAALGTVAVK
YQDMIAALPEATHEAIVGVGKQWSGARALEALLTVAGELRGPPLQLDTGQLLKIAKRG
GVTAVEAVHAWRNALTGAPLNLTPEQVVAIASNGGGKQALETVQRLLPVLCQAHGLTP
EQVVAIASNNGGKQALETVQRLLPVLCQAHGLTPEQVVAIASNIGGKQALETVQRLLPV
LCQAHGLTPEQVVAIASNIGGKQALETVQRLLPVLCQAHGLTPEQVVAIASNGGGKQAL
ETVQRLLPVLCQAHGLTPEQVVAIASNNGGKQALETVQRLLPVLCQAHGLTPEQVVAIA
SNIGGKQALETVQRLLPVLCQAHGLTPEQVVAIASNGGGKQALETVQRLLPVLCQAHGL
TPEQVVAIASNNGGKQALETVQRLLPVLCQAHGLTPEQVVAIASNIGGKQALETVQRLL
PVLCQAHGLTPEQVVAIASNGGGKQALETVQRLLPVLCQAHGLTPEQVVAIASNIGGKQ
ALETVQRLLPVLCQAHGLTPEQVVAIASNIGGKQALETVQRLLPVLCQAHGLTPEQVVA
IASNGGGKQALETVQRLLPVLCQAHGLTPEQVVAIASNIGGKQALETVQRLLPVLCQAH
GLTPEQVVAIASHDGGRPALESIVAQLSRPDPALAALTNDHLVALACLGGRPALDAVKK
GLPHAPALIKRTNRRIPERTSHRVAASLYPERLRRILTNGAIGGDLLLNFPDMSVLERQRA
HLKYLNPTFDSPLAGFFADSSMITGGEMDSYLSTAGLNLPMMYGETTVEGDSRLSISPET
TLGTGNFKAAKFDTETKDCNEAAKKMTMNRDDLVEEGEEEKSKITEQNNGSTKSIKKM
KHKAKKEENNFSNDSSKVTKELEKTDYIHVRARRGQATDSHSIAERVRREKISERMKFL
QDLVPGCDKITGKAGMLDEIINYVQSLQRQIEFLSMKLAIVNPRPDFDMDDIFAKEVAST
PMTVVPSPEMVLSGYSHEMVHSGYSSEMVNSGYLHVNPMQQVNTSSDPLSCFNNGEAP
SMWDSHVQNLYGNLGV
>HA-TALE(ng2, C63)-mNES-cib1-mutNLS
(SEQ ID NO: 148)
YPYDVPDYASRTRLPSPPAPSPAFSADSFSDLLRQFDPSLFNTSLFDSLPPFGA
HHTEAATGEWDEVQSGLRAADAPPPTMRVAVTAARPPRAKPAPRRRAAQPSDASPAA
QVDLRTLGYSQQQQEKIKPKVRSTVAQHHEALVGHGFTHAHIVALSQHPAALGTVAVK
YQDMIAALPEATHEAIVGVGKQWSGARALEALLTVAGELRGPPLQLDTGQLLKIAKRG
GVTAVEAVHAWRNALTGAPLNLTPEQVVAIASNGGGKQALETVQRLLPVLCQAHGLTP
EQVVAIASNNGGKQALETVQRLLPVLCQAHGLTPEQVVAIASNIGGKQALETVQRLLPV
LCQAHGLTPEQVVAIASNIGGKQALETVQRLLPVLCQAHGLTPEQVVAIASNGGGKQAL
ETVQRLLPVLCQAHGLTPEQVVAIASNNGGKQALETVQRLLPVLCQAHGLTPEQVVAIA
SNIGGKQALETVQRLLPVLCQAHGLTPEQVVAIASNGGGKQALETVQRLLPVLCQAHGL
TPEQVVAIASNNGGKQALETVQRLLPVLCQAHGLTPEQVVAIASNIGGKQALETVQRLL
PVLCQAHGLTPEQVVAIASNGGGKQALETVQRLLPVLCQAHGLTPEQVVAIASNIGGKQ
ALETVQRLLPVLCQAHGLTPEQVVAIASNIGGKQALETVQRLLPVLCQAHGLTPEQVVA
IASNGGGKQALETVQRLLPVLCQAHGLTPEQVVAIASNIGGKQALETVQRLLPVLCQAH
GLTPEQVVAIASHDGGRPALESIVAQLSRPDPALAALTNDHLVALACLGGRPALDAVKK
GLPHAPALIKRTNRRIPERTSHRVAASLQLPPLERLTLNGAIGGDLLLNFPDMSVLERQR
AHLKYLNPTFDSPLAGFFADSSMITGGEMDSYLSTAGLNLPMMYGETTVEGDSRLSISPE
TTLGTGNFKAAKFDTETKDCNEAAKKMTMNRDDLVEEGEEEKSKITEQNNGSTKSIKK
MKHKAKKEENNFSNDSSKVTKELEKTDYIHVRARRGQATDSHSIAERVRREKISERMKF
LQDLVPGCDKITGKAGMLDEIINYVQSLQRQIEFLSMKLAIVNPRPDFDMDDIFAKEVAS
TPMTVVPSPEMVLSGYSHEMVHSGYSSEMVNSGYLHVNPMQQVNTSSDPLSCFNNGEA
PSMWDSHVQNLYGNLGV
>HA-TALE(ng2, C63)-ptk2NES-cib1-mutNLS
(SEQ ID NO: 149)
YPYDVPDYASRTRLPSPPAPSPAFSADSFSDLLRQFDPSLFNTSLFDSLPPFGA
HHTEAATGEWDEVQSGLRAADAPPPTMRVAVTAARPPRAKPAPRRRAAQPSDASPAA
QVDLRTLGYSQQQQEKIKPKVRSTVAQHHEALVGHGFTHAHIVALSQHPAALGTVAVK
YQDMIAALPEATHEAIVGVGKQWSGARALEALLTVAGELRGPPLQLDTGQLLKIAKRG
GVTAVEAVHAWRNALTGAPLNLTPEQVVAIASNGGGKQALETVQRLLPVLCQAHGLTP
EQVVAIASNNGGKQALETVQRLLPVLCQAHGLTPEQVVAIASNIGGKQALETVQRLLPV
LCQAHGLTPEQVVAIASNIGGKQALETVQRLLPVLCQAHGLTPEQVVAIASNGGGKQAL
ETVQRLLPVLCQAHGLTPEQVVAIASNNGGKQALETVQRLLPVLCQAHGLTPEQVVAIA
SNIGGKQALETVQRLLPVLCQAHGLTPEQVVAIASNGGGKQALETVQRLLPVLCQAHGL
TPEQVVAIASNNGGKQALETVQRLLPVLCQAHGLTPEQVVAIASNIGGKQALETVQRLL
PVLCQAHGLTPEQVVAIASNGGGKQALETVQRLLPVLCQAHGLTPEQVVAIASNIGGKQ
ALETVQRLLPVLCQAHGLTPEQVVAIASNIGGKQALETVQRLLPVLCQAHGLTPEQVVA
IASNGGGKQALETVQRLLPVLCQAHGLTPEQVVAIASNIGGKQALETVQRLLPVLCQAH
GLTPEQVVAIASHDGGRPALESIVAQLSRPDPALAALTNDHLVALACLGGRPALDAVKK
GLPHAPALIKRTNRRIPERTSHRVAASLDLASLILNGAIGGDLLLNFPDMSVLERQRAHL
KYLNPTFDSPLAGFFADSSMITGGEMDSYLSTAGLNLPMMYGETTVEGDSRLSISPETTL
GTGNFKAAKFDTETKDCNEAAKKMTMNRDDLVEEGEEEKSKITEQNNGSTKSIKKMKH
KAKKEENNFSNDSSKVTKELEKTDYIHVRARRGQATDSHSIAERVRREKISERMKFLQD
LVPGCDKITGKAGMLDEIINYVQSLQRQIEFLSMKLAIVNPRPDFDMDDIFAKEVASTPM
TVVPSPEMVLSGYSHEMVHSGYSSEMVNSGYLHVNPMQQVNTSSDPLSCFNNGEAPSM
WDSHVQNLYGNLGV
>HA-TALE(ng2, C63)-mapkkNES-cib1-mutNLS
(SEQ ID NO: 150)
YPYDVPDYASRTRLPSPPAPSPAFSADSFSDLLRQFDPSLFNTSLFDSLPPFGA
HHTEAATGEWDEVQSGLRAADAPPPTMRVAVTAARPPRAKPAPRRRAAQPSDASPAA
QVDLRTLGYSQQQQEKIKPKVRSTVAQHHEALVGHGFTHAHIVALSQHPAALGTVAVK
YQDMIAALPEATHEAIVGVGKQWSGARALEALLTVAGELRGPPLQLDTGQLLKIAKRG
GVTAVEAVHAWRNALTGAPLNLTPEQVVAIASNGGGKQALETVQRLLPVLCQAHGLTP
EQVVAIASNNGGKQALETVQRLLPVLCQAHGLTPEQVVAIASNIGGKQALETVQRLLPV
LCQAHGLTPEQVVAIASNIGGKQALETVQRLLPVLCQAHGLTPEQVVAIASNGGGKQAL
ETVQRLLPVLCQAHGLTPEQVVAIASNNGGKQALETVQRLLPVLCQAHGLTPEQVVAIA
SNIGGKQALETVQRLLPVLCQAHGLTPEQVVAIASNGGGKQALETVQRLLPVLCQAHGL
TPEQVVAIASNNGGKQALETVQRLLPVLCQAHGLTPEQVVAIASNIGGKQALETVQRLL
PVLCQAHGLTPEQVVAIASNGGGKQALETVQRLLPVLCQAHGLTPEQVVAIASNIGGKQ
ALETVQRLLPVLCQAHGLTPEQVVAIASNIGGKQALETVQRLLPVLCQAHGLTPEQVVA
IASNGGGKQALETVQRLLPVLCQAHGLTPEQVVAIASNIGGKQALETVQRLLPVLCQAH
GLTPEQVVAIASHDGGRPALESIVAQLSRPDPALAALTNDHLVALACLGGRPALDAVKK
GLPHAPALIKRTNRRIPERTSHRVAASLQKKLEELELNGAIGGDLLLNFPDMSVLERQRA
HLKYLNPTFDSPLAGFFADSSMITGGEMDSYLSTAGLNLPMMYGETTVEGDSRLSISPET
TLGTGNFKAAKFDTETKDCNEAAKKMTMNRDDLVEEGEEEKSKITEQNNGSTKSIKKM
KHKAKKEENNFSNDSSKVTKELEKTDYIHVRARRGQATDSHSIAERVRREKISERMKFL
QDLVPGCDKITGKAGMLDEIINYVQSLQRQIEFLSMKLAIVNPRPDFDMDDIFAKEVAST
PMTVVPSPEMVLSGYSHEMVHSGYSSEMVNSGYLHVNPMQQVNTSSDPLSCFNNGEAP
SMWDSHVQNLYGNLGV
>HA-TALE(ng2, C63)-GS-cib1Δ3-mutNLS
(SEQ ID NO: 151)
YPYDVPDYASRTRLPSPPAPSPAFSADSFSDLLRQFDPSLFNTSLFDSLPPFGA
HHTEAATGEWDEVQSGLRAADAPPPTMRVAVTAARPPRAKPAPRRRAAQPSDASPAA
QVDLRTLGYSQQQQEKIKPKVRSTVAQHHEALVGHGFTHAHIVALSQHPAALGTVAVK
YQDMIAALPEATHEAIVGVGKQWSGARALEALLTVAGELRGPPLQLDTGQLLKIAKRG
GVTAVEAVHAWRNALTGAPLNLTPEQVVAIASNGGGKQALETVQRLLPVLCQAHGLTP
EQVVAIASNNGGKQALETVQRLLPVLCQAHGLTPEQVVAIASNIGGKQALETVQRLLPV
LCQAHGLTPEQVVAIASNIGGKQALETVQRLLPVLCQAHGLTPEQVVAIASNGGGKQAL
ETVQRLLPVLCQAHGLTPEQVVAIASNNGGKQALETVQRLLPVLCQAHGLTPEQVVAIA
SNIGGKQALETVQRLLPVLCQAHGLTPEQVVAIASNGGGKQALETVQRLLPVLCQAHGL
TPEQVVAIASNNGGKQALETVQRLLPVLCQAHGLTPEQVVAIASNIGGKQALETVQRLL
PVLCQAHGLTPEQVVAIASNGGGKQALETVQRLLPVLCQAHGLTPEQVVAIASNIGGKQ
ALETVQRLLPVLCQAHGLTPEQVVAIASNIGGKQALETVQRLLPVLCQAHGLTPEQVVA
IASNGGGKQALETVQRLLPVLCQAHGLTPEQVVAIASNIGGKQALETVQRLLPVLCQAH
GLTPEQVVAIASHDGGRPALESIVAQLSRPDPALAALTNDHLVALACLGGRPALDAVKK
GLPHAPALIKRTNRRIPERTSHRVAASGGGGSGGGGSNGAIGGDLLLNFPDMSVLERQR
AHLKYLNPTFDSPLAGFFADSSMITGGEMDSYLSTAGLNLPMMYGETTVEGDSRLSISPE
TTLGTGNFKAAKFDTETKDCNEAAKKMTMNRDDLVEEGEEEKSKITEQNNGSTKSIKK
MKHKAKKEENNFSNDSSKVTKELEKTDYIHVRARRGQATDSHSIAERVRREKISERMKF
LQDLVPGCDKITGKAGMLDEIINYVQSLQRQIEFLSMKLAIVNPRPDFDMDDIFAKEVAS
TPMTVVPSPEMVLSGYSHEMVHSGYSSEMVNSGYLHVNPMQQVNTSS
>HA-TALE(ng2, C63)-wNLS-cib1Δ3-mutNLS
(SEQ ID NO: 152)
YPYDVPDYASRTRLPSPPAPSPAFSADSFSDLLRQFDPSLFNTSLFDSLPPFGA
HHTEAATGEWDEVQSGLRAADAPPPTMRVAVTAARPPRAKPAPRRRAAQPSDASPAA
QVDLRTLGYSQQQQEKIKPKVRSTVAQHHEALVGHGFTHAHIVALSQHPAALGTVAVK
YQDMIAALPEATHEAIVGVGKQWSGARALEALLTVAGELRGPPLQLDTGQLLKIAKRG
GVTAVEAVHAWRNALTGAPLNLTPEQVVAIASNGGGKQALETVQRLLPVLCQAHGLTP
EQVVAIASNNGGKQALETVQRLLPVLCQAHGLTPEQVVAIASNIGGKQALETVQRLLPV
LCQAHGLTPEQVVAIASNIGGKQALETVQRLLPVLCQAHGLTPEQVVAIASNGGGKQAL
ETVQRLLPVLCQAHGLTPEQVVAIASNNGGKQALETVQRLLPVLCQAHGLTPEQVVAIA
SNIGGKQALETVQRLLPVLCQAHGLTPEQVVAIASNGGGKQALETVQRLLPVLCQAHGL
TPEQVVAIASNNGGKQALETVQRLLPVLCQAHGLTPEQVVAIASNIGGKQALETVQRLL
PVLCQAHGLTPEQVVAIASNGGGKQALETVQRLLPVLCQAHGLTPEQVVAIASNIGGKQ
ALETVQRLLPVLCQAHGLTPEQVVAIASNIGGKQALETVQRLLPVLCQAHGLTPEQVVA
IASNGGGKQALETVQRLLPVLCQAHGLTPEQVVAIASNIGGKQALETVQRLLPVLCQAH
GLTPEQVVAIASHDGGRPALESIVAQLSRPDPALAALTNDHLVALACLGGRPALDAVKK
GLPHAPALIKRTNRRIPERTSHRVAASLYPERLRRILTNGAIGGDLLLNFPDMSVLERQRA
HLKYLNPTFDSPLAGFFADSSMITGGEMDSYLSTAGLNLPMMYGETTVEGDSRLSISPET
TLGTGNFKAAKFDTETKDCNEAAKKMTMNRDDLVEEGEEEKSKITEQNNGSTKSIKKM
KHKAKKEENNFSNDSSKVTKELEKTDYIHVRARRGQATDSHSIAERVRREKISERMKFL
QDLVPGCDKITGKAGMLDEIINYVQSLQRQIEFLSMKLAIVNPRPDFDMDDIFAKEVAST
PMTVVPSPEMVLSGYSHEMVHSGYSSEMVNSGYLHVNPMQQVNTSS
>HA-TALE(ng2, C63)-mNLS-cib1Δ3-mutNLS
(SEQ ID NO: 153)
YPYDVPDYASRTRLPSPPAPSPAFSADSFSDLLRQFDPSLFNTSLFDSLPPFGA
HHTEAATGEWDEVQSGLRAADAPPPTMRVAVTAARPPRAKPAPRRRAAQPSDASPAA
QVDLRTLGYSQQQQEKIKPKVRSTVAQHHEALVGHGFTHAHIVALSQHPAALGTVAVK
YQDMIAALPEATHEAIVGVGKQWSGARALEALLTVAGELRGPPLQLDTGQLLKIAKRG
GVTAVEAVHAWRNALTGAPLNLTPEQVVAIASNGGGKQALETVQRLLPVLCQAHGLTP
EQVVAIASNNGGKQALETVQRLLPVLCQAHGLTPEQVVAIASNIGGKQALETVQRLLPV
LCQAHGLTPEQVVAIASNIGGKQALETVQRLLPVLCQAHGLTPEQVVAIASNGGGKQAL
ETVQRLLPVLCQAHGLTPEQVVAIASNNGGKQALETVQRLLPVLCQAHGLTPEQVVAIA
SNIGGKQALETVQRLLPVLCQAHGLTPEQVVAIASNGGGKQALETVQRLLPVLCQAHGL
TPEQVVAIASNNGGKQALETVQRLLPVLCQAHGLTPEQVVAIASNIGGKQALETVQRLL
PVLCQAHGLTPEQVVAIASNGGGKQALETVQRLLPVLCQAHGLTPEQVVAIASNIGGKQ
ALETVQRLLPVLCQAHGLTPEQVVAIASNIGGKQALETVQRLLPVLCQAHGLTPEQVVA
IASNGGGKQALETVQRLLPVLCQAHGLTPEQVVAIASNIGGKQALETVQRLLPVLCQAH
GLTPEQVVAIASHDGGRPALESIVAQLSRPDPALAALTNDHLVALACLGGRPALDAVKK
GLPHAPALIKRTNRRIPERTSHRVAASSPKKKRKVEASNGAIGGDLLLNFPDMSVLERQR
AHLKYLNPTFDSPLAGFFADSSMITGGEMDSYLSTAGLNLPMMYGETTVEGDSRLSISPE
TTLGTGNFKAAKFDTETKDCNEAAKKMTMNRDDLVEEGEEEKSKITEQNNGSTKSIKK
MKHKAKKEENNFSNDSSKVTKELEKTDYIHVRARRGQATDSHSIAERVRREKISERMKF
LQDLVPGCDKITGKAGMLDEIINYVQSLQRQIEFLSMKLAIVNPRPDFDMDDIFAKEVAS
TPMTVVPSPEMVLSGYSHEMVHSGYSSEMVNSGYLHVNPMQQVNTSS
>HA-TALE(ng2, C63)-GS-GS-cib1-mutNLS-mutbHLH
(SEQ ID NO: 154)
YPYDVPDYASRTRLPSPPAPSPAFSADSFSDLLRQFDPSLFNTSLFDSLPPFGA
HHTEAATGEWDEVQSGLRAADAPPPTMRVAVTAARPPRAKPAPRRRAAQPSDASPAA
QVDLRTLGYSQQQQEKIKPKVRSTVAQHHEALVGHGFTHAHIVALSQHPAALGTVAVK
YQDMIAALPEATHEAIVGVGKQWSGARALEALLTVAGELRGPPLQLDTGQLLKIAKRG
GVTAVEAVHAWRNALTGAPLNLTPEQVVAIASNGGGKQALETVQRLLPVLCQAHGLTP
EQVVAIASNNGGKQALETVQRLLPVLCQAHGLTPEQVVAIASNIGGKQALETVQRLLPV
LCQAHGLTPEQVVAIASNIGGKQALETVQRLLPVLCQAHGLTPEQVVAIASNGGGKQAL
ETVQRLLPVLCQAHGLTPEQVVAIASNNGGKQALETVQRLLPVLCQAHGLTPEQVVAIA
SNIGGKQALETVQRLLPVLCQAHGLTPEQVVAIASNGGGKQALETVQRLLPVLCQAHGL
TPEQVVAIASNNGGKQALETVQRLLPVLCQAHGLTPEQVVAIASNIGGKQALETVQRLL
PVLCQAHGLTPEQVVAIASNGGGKQALETVQRLLPVLCQAHGLTPEQVVAIASNIGGKQ
ALETVQRLLPVLCQAHGLTPEQVVAIASNIGGKQALETVQRLLPVLCQAHGLTPEQVVA
IASNGGGKQALETVQRLLPVLCQAHGLTPEQVVAIASNIGGKQALETVQRLLPVLCQAH
GLTPEQVVAIASHDGGRPALESIVAQLSRPDPALAALTNDHLVALACLGGRPALDAVKK
GLPHAPALIKRTNRRIPERTSHRVAASGGGGSGGGGSNGAIGGDLLLNFPDMSVLERQR
AHLKYLNPTFDSPLAGFFADSSMITGGEMDSYLSTAGLNLPMMYGETTVEGDSRLSISPE
TTLGTGNFKAAKFDTETKDCNEAAKKMTMNRDDLVEEGEEEKSKITEQNNGSTKSIKK
MKHKAKKEENNFSNDSSKVTKELEKTDYIHVRARAAQATDSHSIAEAVAREKISERMK
FLQDLVPGCDKITGKAGMLDEIINYVQSLQRQIEFLSMKLAIVNPRPDFDMDDIFAKEVA
STPMTVVPSPEMVLSGYSHEMVHSGYSSEMVNSGYLHVNPMQQVNTSSDPLSCFNNGE
APSMWDSHVQNLYGNLGV
>HA-TALE(ng2, C63)-wNES-cib1-mutNLS-mutbHLH
(SEQ ID NO: 155)
SRTRLPSPPAPSPAFSADSFSDLLRQFDPSLFNTSLFDSLPPFGAHHTEAATGE
WDEVQSGLRAADAPPPTMRVAVTAARPPRAKPAPRRRAAQPSDASPAAQVDLRTLGYS
QQQQEKIKPKVRSTVAQHHEALVGHGFTHAHIVALSQHPAALGTVAVKYQDMIAALPE
ATHEAIVGVGKQWSGARALEALLTVAGELRGPPLQLDTGQLLKIAKRGGVTAVEAVHA
WRNALTGAPLNLTPEQVVAIASNGGGKQALETVQRLLPVLCQAHGLTPEQVVAIASNN
GGKQALETVQRLLPVLCQAHGLTPEQVVAIASNIGGKQALETVQRLLPVLCQAHGLTPE
QVVAIASNIGGKQALETVQRLLPVLCQAHGLTPEQVVAIASNGGGKQALETVQRLLPVL
CQAHGLTPEQVVAIASNNGGKQALETVQRLLPVLCQAHGLTPEQVVAIASNIGGKQALE
TVQRLLPVLCQAHGLTPEQVVAIASNGGGKQALETVQRLLPVLCQAHGLTPEQVVAIAS
NNGGKQALETVQRLLPVLCQAHGLTPEQVVAIASNIGGKQALETVQRLLPVLCQAHGL
TPEQVVAIASNGGGKQALETVQRLLPVLCQAHGLTPEQVVAIASNIGGKQALETVQRLL
PVLCQAHGLTPEQVVAIASNIGGKQALETVQRLLPVLCQAHGLTPEQVVAIASNGGGKQ
ALETVQRLLPVLCQAHGLTPEQVVAIASNIGGKQALETVQRLLPVLCQAHGLTPEQVVA
IASHDGGRPALESIVAQLSRPDPALAALTNDHLVALACLGGRPALDAVKKGLPHAPALI
KRTNRRIPERTSHRVAASLYPERLRRILTNGAIGGDLLLNFPDMSVLERQRAHLKYLNPT
FDSPLAGFFADSSMITGGEMDSYLSTAGLNLPMMYGETTVEGDSRLSISPETTLGTGNFK
AAKFDTETKDCNEAAKKMTMNRDDLVEEGEEEKSKITEQNNGSTKSIKKMKHKAKKE
ENNFSNDSSKVTKELEKTDYIHVRARAAQATDSHSIAEAVAREKISERMKFLQDLVPGC
DKITGKAGMLDEIINYVQSLQRQIEFLSMKLAIVNPREDFDMDDIFAKEVASTPMTVVPS
PEMVLSGYSHEMVHSGYSSEMVNSGYLHVNPMQQVNTSSDPLSCFNNGEAPSMWDSH
VQNLYGNLGV
>HA-TALE(ng2, C63)-GS-cib1Δ1-mutNLS
(SEQ ID NO: 156)
YPYDVPDYASRTRLPSPPAPSPAFSADSFSDLLRQFDPSLFNTSLFDSLPPFGA
HHTEAATGEWDEVQSGLRAADAPPPTMRVAVTAARPPRAKPAPRRRAAQPSDASPAA
QVDLRTLGYSQQQQEKIKPKVRSTVAQHHEALVGHGFTHAHIVALSQHPAALGTVAVK
YQDMIAALPEATHEAIVGVGKQWSGARALEALLTVAGELRGPPLQLDTGQLLKIAKRG
GVTAVEAVHAWRNALTGAPLNLTPEQVVAIASNGGGKQALETVQRLLPVLCQAHGLTP
EQVVAIASNNGGKQALETVQRLLPVLCQAHGLTPEQVVAIASNIGGKQALETVQRLLPV
LCQAHGLTPEQVVAIASNIGGKQALETVQRLLPVLCQAHGLTPEQVVAIASNGGGKQAL
ETVQRLLPVLCQAHGLTPEQVVAIASNNGGKQALETVQRLLPVLCQAHGLTPEQVVAIA
SNIGGKQALETVQRLLPVLCQAHGLTPEQVVAIASNGGGKQALETVQRLLPVLCQAHGL
TPEQVVAIASNNGGKQALETVQRLLPVLCQAHGLTPEQVVAIASNIGGKQALETVQRLL
PVLCQAHGLTPEQVVAIASNGGGKQALETVQRLLPVLCQAHGLTPEQVVAIASNIGGKQ
ALETVQRLLPVLCQAHGLTPEQVVAIASNIGGKQALETVQRLLPVLCQAHGLTPEQVVA
IASNGGGKQALETVQRLLPVLCQAHGLTPEQVVAIASNIGGKQALETVQRLLPVLCQAH
GLTPEQVVAIASHDGGRPALESIVAQLSRPDPALAALTNDHLVALACLGGRPALDAVKK
GLPHAPALIKRTNRRIPERTSHRVAASGGGGSGGGGSNGAIGGDLLLNFPDMSVLERQR
AHLKYLNPTFDSPLAGFFADSSMITGGEMDSYLSTAGLNLPMMYGETTVEGDSRLSISPE
TTLGTGNFKAAKFDTETKDCNEAAKKMTMNRDDLVEEGEEEKSKITEQNNGSTKSIKK
MKHKAKKEENNFSNDSSKVTKELEKTDYIHVRARRGQATDSHSIAERVRREKISERMKF
LQDLVPGCDKITGKAGMLDEIINYVQSLQRGGSVASTPMTVVPSPEMVLSGYSHEMVHS
GYSSEMVNSGYLHVNPMQQVNTSSDPLSCFNNGEAPSMWDSHVQNLYGNLGV
>HA-TALE(ng2, C63)-wNLS-cib1Δ1-mutNLS
(SEQ ID NO: 157)
YPYDVPDYASRTRLPSPPAPSPAFSADSFSDLLRQFDPSLFNTSLFDSLPPFGA
HHTEAATGEWDEVQSGLRAADAPPPTMRVAVTAARPPRAKPAPRRRAAQPSDASPAA
QVDLRTLGYSQQQQEKIKPKVRSTVAQHHEALVGHGFTHAHIVALSQHPAALGTVAVK
YQDMIAALPEATHEAIVGVGKQWSGARALEALLTVAGELRGPPLQLDTGQLLKIAKRG
GVTAVEAVHAWRNALTGAPLNLTPEQVVAIASNGGGKQALETVQRLLPVLCQAHGLTP
EQVVAIASNNGGKQALETVQRLLPVLCQAHGLTPEQVVAIASNIGGKQALETVQRLLPV
LCQAHGLTPEQVVAIASNIGGKQALETVQRLLPVLCQAHGLTPEQVVAIASNGGGKQAL
ETVQRLLPVLCQAHGLTPEQVVAIASNNGGKQALETVQRLLPVLCQAHGLTPEQVVAIA
SNIGGKQALETVQRLLPVLCQAHGLTPEQVVAIASNGGGKQALETVQRLLPVLCQAHGL
TPEQVVAIASNNGGKQALETVQRLLPVLCQAHGLTPEQVVAIASNIGGKQALETVQRLL
PVLCQAHGLTPEQVVAIASNGGGKQALETVQRLLPVLCQAHGLTPEQVVAIASNIGGKQ
ALETVQRLLPVLCQAHGLTPEQVVAIASNIGGKQALETVQRLLPVLCQAHGLTPEQVVA
IASNGGGKQALETVQRLLPVLCQAHGLTPEQVVAIASNIGGKQALETVQRLLPVLCQAH
GLTPEQVVAIASHDGGRPALESIVAQLSRPDPALAALTNDHLVALACLGGRPALDAVKK
GLPHAPALIKRTNRRIPERTSHRVAASLYPERLRRILTNGAIGGDLLLNFPDMSVLERQRA
HLKYLNPTFDSPLAGFFADSSMITGGEMDSYLSTAGLNLPMMYGETTVEGDSRLSISPET
TLGTGNFKAAKFDTETKDCNEAAKKMTMNRDDLVEEGEEEKSKITEQNNGSTKSIKKM
KHKAKKEENNFSNDSSKVTKELEKTDYIHVRARRGQATDSHSIAERVRREKISERMKFL
QDLVPGCDKITGKAGMLDEIINYVQSLQRGGSGEEEKSKITEQNNGSTKSIKKMKHKAK
KEENNFSNDSSKVTKELEKTDYIHVRARRGQATDSHSIAERVRREKISERMKFLQDLVP
GCDKITGKAGMLDEIINYVQSLQRGGSVASTPMTVVPSPEMVLSGYSHEMVHSGYSSE
MVNSGYLHVNPMQQVNTSSDPLSCFNNGEAPSMWDSHVQNLYGNLGV
>HA-TALE(ng2, C63)-GS-cib1Δ2-mutNLS
(SEQ ID NO: 158)
YPYDVPDYASRTRLPSPPAPSPAFSADSFSDLLRQFDPSLFNTSLFDSLPPFGA
HHTEAATGEWDEVQSGLRAADAPPPTMRVAVTAARPPRAKPAPRRRAAQPSDASPAA
QVDLRTLGYSQQQQEKIKPKVRSTVAQHHEALVGHGFTHAHIVALSQHPAALGTVAVK
YQDMIAALPEATHEAIVGVGKQWSGARALEALLTVAGELRGPPLQLDTGQLLKIAKRG
GVTAVEAVHAWRNALTGAPLNLTPEQVVAIASNGGGKQALETVQRLLPVLCQAHGLTP
EQVVAIASNNGGKQALETVQRLLPVLCQAHGLTPEQVVAIASNIGGKQALETVQRLLPV
LCQAHGLTPEQVVAIASNIGGKQALETVQRLLPVLCQAHGLTPEQVVAIASNGGGKQAL
ETVQRLLPVLCQAHGLTPEQVVAIASNNGGKQALETVQRLLPVLCQAHGLTPEQVVAIA
SNIGGKQALETVQRLLPVLCQAHGLTPEQVVAIASNGGGKQALETVQRLLPVLCQAHGL
TPEQVVAIASNNGGKQALETVQRLLPVLCQAHGLTPEQVVAIASNIGGKQALETVQRLL
PVLCQAHGLTPEQVVAIASNGGGKQALETVQRLLPVLCQAHGLTPEQVVAIASNIGGKQ
ALETVQRLLPVLCQAHGLTPEQVVAIASNIGGKQALETVQRLLPVLCQAHGLTPEQVVA
IASNGGGKQALETVQRLLPVLCQAHGLTPEQVVAIASNIGGKQALETVQRLLPVLCQAH
GLTPEQVVAIASHDGGRPALESIVAQLSRPDPALAALTNDHLVALACLGGRPALDAVKK
GLPHAPALIKRTNRRIPERTSHRVAASGGGGSGGGGSNGAIGGDLLLNFPDMSVLERQR
AHLKYLNPTFDSPLAGFFADSSMITGGEMDSYLSTAGLNLPMMYGETTVEGDSRLSISPE
TTLGTGNFKAAKFDTETKDCNEAAKKMTMNRDDLVEEGEEEKSKITEQNNGSTKSIKK
MKHKAKKEENNFSNDSSKVTKELEKTDYIHVRARRGQATDSHSIAERVRREKISERMKF
LQDLVPGCDKITGKAGMLDEIINYVQSLQRQIEFLSMKLAIVNPRPDFDMDDIFAKEVAS
TPMTVVPSPEMVLSGYGGSPLSCFNNGEAPSMWDSHVQNLYGNLGV
>HA-TALE(ng2, C63)-wNES-cib1Δ2-mutNLS
(SEQ ID NO: 159)
YPYDVPDYASRTRLPSPPAPSPAFSADSFSDLLRQFDPSLFNTSLFDSLPPFGA
HHTEAATGEWDEVQSGLRAADAPPPTMRVAVTAARPPRAKPAPRRRAAQPSDASPAA
QVDLRTLGYSQQQQEKIKPKVRSTVAQHHEALVGHGFTHAHIVALSQHPAALGTVAVK
YQDMIAALPEATHEAIVGVGKQWSGARALEALLTVAGELRGPPLQLDTGQLLKIAKRG
GVTAVEAVHAWRNALTGAPLNLTPEQVVAIASNGGGKQALETVQRLLPVLCQAHGLTP
EQVVAIASNNGGKQALETVQRLLPVLCQAHGLTPEQVVAIASNIGGKQALETVQRLLPV
LCQAHGLTPEQVVAIASNIGGKQALETVQRLLPVLCQAHGLTPEQVVAIASNGGGKQAL
ETVQRLLPVLCQAHGLTPEQVVAIASNNGGKQALETVQRLLPVLCQAHGLTPEQVVAIA
SNIGGKQALETVQRLLPVLCQAHGLTPEQVVAIASNGGGKQALETVQRLLPVLCQAHGL
TPEQVVAIASNNGGKQALETVQRLLPVLCQAHGLTPEQVVAIASNIGGKQALETVQRLL
PVLCQAHGLTPEQVVAIASNGGGKQALETVQRLLPVLCQAHGLTPEQVVAIASNIGGKQ
ALETVQRLLPVLCQAHGLTPEQVVAIASNIGGKQALETVQRLLPVLCQAHGLTPEQVVA
IASNGGGKQALETVQRLLPVLCQAHGLTPEQVVAIASNIGGKQALETVQRLLPVLCQAH
GLTPEQVVAIASHDGGRPALESIVAQLSRPDPALAALTNDHLVALACLGGRPALDAVKK
GLPHAPALIKRTNRRIPERTSHRVAASLYPERLRRILTNGAIGGDLLLNFPDMSVLERQRA
HLKYLNPTFDSPLAGFFADSSMITGGEMDSYLSTAGLNLPMMYGETTVEGDSRLSISPET
TLGTGNFKAAKFDTETKDCNEAAKKMTMNRDDLVEEGEEEKSKITEQNNGSTKSIKKM
KHKAKKEENNFSNDSSKVTKELEKTDYIHVRARRGQATDSHSIAERVRREKISERMKFL
QDLVPGCDKITGKAGMLDEIINYVQSLQRQIEFLSMKLAIVNPRPDFDMDDIFAKEVAST
PMTVVPSPEMVLSGYGGSPLSCFNNGEAPSMWDSHVQNLYGNLGV
>HA-TALE(ng2, C63)-NLS-cib1-mutNLS-mutbHLH
(SEQ ID NO: 160)
YPYDVPDYASRTRLPSPPAPSPAFSADSFSDLLRQFDPSLFNTSLFDSLPPFGA
HHTEAATGEWDEVQSGLRAADAPPPTMRVAVTAARPPRAKPAPRRRAAQPSDASPAA
QVDLRTLGYSQQQQEKIKPKVRSTVAQHHEALVGHGFTHAHIVALSQHPAALGTVAVK
YQDMIAALPEATHEAIVGVGKQWSGARALEALLTVAGELRGPPLQLDTGQLLKIAKRG
GVTAVEAVHAWRNALTGAPLNLTPEQVVAIASNGGGKQALETVQRLLPVLCQAHGLTP
EQVVAIASNNGGKQALETVQRLLPVLCQAHGLTPEQVVAIASNIGGKQALETVQRLLPV
LCQAHGLTPEQVVAIASNIGGKQALETVQRLLPVLCQAHGLTPEQVVAIASNGGGKQAL
ETVQRLLPVLCQAHGLTPEQVVAIASNNGGKQALETVQRLLPVLCQAHGLTPEQVVAIA
SNIGGKQALETVQRLLPVLCQAHGLTPEQVVAIASNGGGKQALETVQRLLPVLCQAHGL
TPEQVVAIASNNGGKQALETVQRLLPVLCQAHGLTPEQVVAIASNIGGKQALETVQRLL
PVLCQAHGLTPEQVVAIASNGGGKQALETVQRLLPVLCQAHGLTPEQVVAIASNIGGKQ
ALETVQRLLPVLCQAHGLTPEQVVAIASNIGGKQALETVQRLLPVLCQAHGLTPEQVVA
IASNGGGKQALETVQRLLPVLCQAHGLTPEQVVAIASNIGGKQALETVQRLLPVLCQAH
GLTPEQVVAIASHDGGRPALESIVAQLSRPDPALAALTNDHLVALACLGGRPALDAVKK
GLPHAPALIKRTNRRIPERTSHRVAASSPKKKRKVEASNGAIGGDLLLNFPDMSVLERQR
AHLKYLNPTFDSPLAGFFADSSMITGGEMDSYLSTAGLNLPMMYGETTVEGDSRLSISPE
TTLGTGNFKAAKFDTETKDCNEAAKKMTMNRDDLVEEGEEEKSKITEQNNGSTKSIKK
MKHKAKKEENNFSNDSSKVTKELEKTDYIHVRARAAQATDSHSIAEAVAREKISERMK
FLQDLVPGCDKITGKAGMLDEIINYVQSLQRQIEFLSMKLAIVNPRPDFDMDDIFAKEVA
STPMTVVPSPEMVLSGYSHEMVHSGYSSEMVNSGYLHVNPMQQVNTSSDPLSCFNNGE
APSMWDSHVQNLYGNLGV
>HA-TALE(ng2, C63)-NLS-cib1Δ1-mutNLS
(SEQ ID NO: 161)
YPYDVPDYASRTRLPSPPAPSPAFSADSFSDLLRQFDPSLFNTSLFDSLPPFGA
HHTEAATGEWDEVQSGLRAADAPPPTMRVAVTAARPPRAKPAPRRRAAQPSDASPAA
QVDLRTLGYSQQQQEKIKPKVRSTVAQHHEALVGHGFTHAHIVALSQHPAALGTVAVK
YQDMIAALPEATHEAIVGVGKQWSGARALEALLTVAGELRGPPLQLDTGQLLKIAKRG
GVTAVEAVHAWRNALTGAPLNLTPEQVVAIASNGGGKQALETVQRLLPVLCQAHGLTP
EQVVAIASNNGGKQALETVQRLLPVLCQAHGLTPEQVVAIASNIGGKQALETVQRLLPV
LCQAHGLTPEQVVAIASNIGGKQALETVQRLLPVLCQAHGLTPEQVVAIASNGGGKQAL
ETVQRLLPVLCQAHGLTPEQVVAIASNNGGKQALETVQRLLPVLCQAHGLTPEQVVAIA
SNIGGKQALETVQRLLPVLCQAHGLTPEQVVAIASNGGGKQALETVQRLLPVLCQAHGL
TPEQVVAIASNNGGKQALETVQRLLPVLCQAHGLTPEQVVAIASNIGGKQALETVQRLL
PVLCQAHGLTPEQVVAIASNGGGKQALETVQRLLPVLCQAHGLTPEQVVAIASNIGGKQ
ALETVQRLLPVLCQAHGLTPEQVVAIASNIGGKQALETVQRLLPVLCQAHGLTPEQVVA
IASNGGGKQALETVQRLLPVLCQAHGLTPEQVVAIASNIGGKQALETVQRLLPVLCQAH
GLTPEQVVAIASHDGGRPALESIVAQLSRPDPALAALTNDHLVALACLGGRPALDAVKK
GLPHAPALIKRTNRRIPERTSHRVAASSPKKKRKVEASNGAIGGDLLLNFPDMSVLERQR
AHLKYLNPTFDSPLAGFFADSSMITGGEMDSYLSTAGLNLPMMYGETTVEGDSRLSISPE
TTLGTGNFKAAKFDTETKDCNEAAKKMTMNRDDLVEEGEEEKSKITEQNNGSTKSIKK
MKHKAKKEENNFSNDSSKVTKELEKTDYIHVRARRGQATDSHSIAERVRREKISERMKF
LQDLVPGCDKITGKAGMLDEIINYVQSLQRGGSVASTPMTVVPSPEMVLSGYSHEMVHS
GYSSEMVNSGYLHVNPMQQVNTSSDPLSCFNNGEAPSMWDSHVQNLYGNLGV
>HA-TALE(ng2, C63)-NLS-cib1Δ2-mutNLS
(SEQ ID NO: 162)
YPYDVPDYASRTRLPSPPAPSPAFSADSFSDLLRQFDPSLFNTSLFDSLPPFGA
HHTEAATGEWDEVQSGLRAADAPPPTMRVAVTAARPPRAKPAPRRRAAQPSDASPAA
QVDLRTLGYSQQQQEKIKPKVRSTVAQHHEALVGHGFTHAHIVALSQHPAALGTVAVK
YQDMIAALPEATHEAIVGVGKQWSGARALEALLTVAGELRGPPLQLDTGQLLKIAKRG
GVTAVEAVHAWRNALTGAPLNLTPEQVVAIASNGGGKQALETVQRLLPVLCQAHGLTP
EQVVAIASNNGGKQALETVQRLLPVLCQAHGLTPEQVVAIASNIGGKQALETVQRLLPV
LCQAHGLTPEQVVAIASNIGGKQALETVQRLLPVLCQAHGLTPEQVVAIASNGGGKQAL
ETVQRLLPVLCQAHGLTPEQVVAIASNNGGKQALETVQRLLPVLCQAHGLTPEQVVAIA
SNIGGKQALETVQRLLPVLCQAHGLTPEQVVAIASNGGGKQALETVQRLLPVLCQAHGL
TPEQVVAIASNNGGKQALETVQRLLPVLCQAHGLTPEQVVAIASNIGGKQALETVQRLL
PVLCQAHGLTPEQVVAIASNGGGKQALETVQRLLPVLCQAHGLTPEQVVAIASNIGGKQ
ALETVQRLLPVLCQAHGLTPEQVVAIASNIGGKQALETVQRLLPVLCQAHGLTPEQVVA
IASNGGGKQALETVQRLLPVLCQAHGLTPEQVVAIASNIGGKQALETVQRLLPVLCQAH
GLTPEQVVAIASHDGGRPALESIVAQLSRPDPALAALTNDHLVALACLGGRPALDAVKK
GLPHAPALIKRTNRRIPERTSHRVAASLYPERLRRILTNGAIGGDLLLNFPDMSVLERQRA
HLKYLNPTFDSPLAGFFADSSMITGGEMDSYLSTAGLNLPMMYGETTVEGDSRLSISPET
TLGTGNFKAAKFDTETKDCNEAAKKMTMNRDDLVEEGEEEKSKITEQNNGSTKSIKKM
KHKAKKEENNFSNDSSKVTKELEKTDYIHVRARRGQATDSHSIAERVRREKISERMKFL
QDLVPGCDKITGKAGMLDEIINYVQSLQRQIEFLSMKLAIVNPRPDFDMDDIFAKEVAST
PMTVVPSPEMVLSGYGGSPLSCFNNGEAPSMWDSHVQNLYGNLGV
>HA-TALE(ng2, C63)-GS-iNES1-cib1-mutNLS
(SEQ ID NO: 163)
YPYDVPDYASRTRLPSPPAPSPAFSADSFSDLLRQFDPSLFNTSLFDSLPPFGA
HHTEAATGEWDEVQSGLRAADAPPPTMRVAVTAARPPRAKPAPRRRAAQPSDASPAA
QVDLRTLGYSQQQQEKIKPKVRSTVAQHHEALVGHGFTHAHIVALSQHPAALGTVAVK
YQDMIAALPEATHEAIVGVGKQWSGARALEALLTVAGELRGPPLQLDTGQLLKIAKRG
GVTAVEAVHAWRNALTGAPLNLTPEQVVAIASNGGGKQALETVQRLLPVLCQAHGLTP
EQVVAIASNNGGKQALETVQRLLPVLCQAHGLTPEQVVAIASNIGGKQALETVQRLLPV
LCQAHGLTPEQVVAIASNIGGKQALETVQRLLPVLCQAHGLTPEQVVAIASNGGGKQAL
ETVQRLLPVLCQAHGLTPEQVVAIASNNGGKQALETVQRLLPVLCQAHGLTPEQVVAIA
SNIGGKQALETVQRLLPVLCQAHGLTPEQVVAIASNGGGKQALETVQRLLPVLCQAHGL
TPEQVVAIASNNGGKQALETVQRLLPVLCQAHGLTPEQVVAIASNIGGKQALETVQRLL
PVLCQAHGLTPEQVVAIASNGGGKQALETVQRLLPVLCQAHGLTPEQVVAIASNIGGKQ
ALETVQRLLPVLCQAHGLTPEQVVAIASNIGGKQALETVQRLLPVLCQAHGLTPEQVVA
IASNGGGKQALETVQRLLPVLCQAHGLTPEQVVAIASNIGGKQALETVQRLLPVLCQAH
GLTPEQVVAIASHDGGRPALESIVAQLSRPDPALAALTNDHLVALACLGGRPALDAVKK
GLPHAPALIKRTNRRIPERTSHRVAASGGGGSGGGGSNGAIGGDLLLNFPDMSVLERQR
AHLKYLLYPERLRRILTNPTFDSPLAGFFADSSMITGGEMDSYLSTAGLNLPMMYGETT
VEGDSRLSISPETTLGTGNFKAAKFDTETKDCNEAAKKMTMNRDDLVEEGEEEKSKITE
QNNGSTKSIKKEENNFSNDSSKVTKELEKTDYIHVRARRGQATDSHSIAERV
RREKISERMKFLQDLVPGCDKITGKAGMLDEIINYVQSLQRQIEFLSMKLAIVNPRPDFD
MDDIFAKEVASTPMTVVPSPEMVLSGYSHEMVHSGYSSEMVNSGYLHVNPMQQVNTS
SDPLSCFNNGEAPSMWDSHVQNLYGNLGV
>HA-TALE(ng2, C63)-GS-iNES2-cib1-mutNLS
(SEQ ID NO: 164)
YPYDVPDYASRTRLPSPPAPSPAFSADSFSDLLRQFDPSLFNTSLFDSLPPFGA
HHTEAATGEWDEVQSGLRAADAPPPTMRVAVTAARPPRAKPAPRRRAAQPSDASPAA
QVDLRTLGYSQQQQEKIKPKVRSTVAQHHEALVGHGFTHAHIVALSQHPAALGTVAVK
YQDMIAALPEATHEAIVGVGKQWSGARALEALLTVAGELRGPPLQLDTGQLLKIAKRG
GVTAVEAVHAWRNALTGAPLNLTPEQVVAIASNGGGKQALETVQRLLPVLCQAHGLTP
EQVVAIASNNGGKQALETVQRLLPVLCQAHGLTPEQVVAIASNIGGKQALETVQRLLPV
LCQAHGLTPEQVVAIASNIGGKQALETVQRLLPVLCQAHGLTPEQVVAIASNGGGKQAL
ETVQRLLPVLCQAHGLTPEQVVAIASNNGGKQALETVQRLLPVLCQAHGLTPEQVVAIA
SNIGGKQALETVQRLLPVLCQAHGLTPEQVVAIASNGGGKQALETVQRLLPVLCQAHGL
TPEQVVAIASNNGGKQALETVQRLLPVLCQAHGLTPEQVVAIASNIGGKQALETVQRLL
PVLCQAHGLTPEQVVAIASNGGGKQALETVQRLLPVLCQAHGLTPEQVVAIASNIGGKQ
ALETVQRLLPVLCQAHGLTPEQVVAIASNIGGKQALETVQRLLPVLCQAHGLTPEQVVA
IASNGGGKQALETVQRLLPVLCQAHGLTPEQVVAIASNIGGKQALETVQRLLPVLCQAH
GLTPEQVVAIASHDGGRPALESIVAQLSRPDPALAALTNDHLVALACLGGRPALDAVKK
GLPHAPALIKRTNRRIPERTSHRVAASGGGGSGGGGSNGAIGGDLLLNFPDMSVLERQR
AHLKYLNPTFDSPLAGFFADSSMITGGEMDLYPERLRRILTSYLSTAGLNLPMMYGETT
VEGDSRLSISPETTLGTGNFKAAKFDTETKDCNEAAKKMTMNRDDLVEEGEEEKSKITE
QNNGSTKSIKKMKHKAKKEENNFSNDSSKVTKELEKTDYIHVRARRGQATDSHSIAERV
RREKISERMKFLQDLVPGCDKITGKAGMLDEIINYVQSLQRQIEFLSMKLAIVNPRPDFD
MDDIFAKEVASTPMTVVPSPEMVLSGYSHEMVHSGYSSEMVNSGYLHVNPMQQVNTS
SDPLSCFNNGEAPSMWDSHVQNLYGNLGV
>HA-TALE(ng2, C63)-GS-iNES3-cib1-mutNLS
(SEQ ID NO: 165)
YPYDVPDYASRTRLPSPPAPSPAFSADSFSDLLRQFDPSLFNTSLFDSLPPFGA
HHTEAATGEWDEVQSGLRAADAPPPTMRVAVTAARPPRAKPAPRRRAAQPSDASPAA
QVDLRTLGYSQQQQEKIKPKVRSTVAQHHEALVGHGFTHAHIVALSQHPAALGTVAVK
YQDMIAALPEATHEAIVGVGKQWSGARALEALLTVAGELRGPPLQLDTGQLLKIAKRG
GVTAVEAVHAWRNALTGAPLNLTPEQVVAIASNGGGKQALETVQRLLPVLCQAHGLTP
EQVVAIASNNGGKQALETVQRLLPVLCQAHGLTPEQVVAIASNIGGKQALETVQRLLPV
LCQAHGLTPEQVVAIASNIGGKQALETVQRLLPVLCQAHGLTPEQVVAIASNGGGKQAL
ETVQRLLPVLCQAHGLTPEQVVAIASNNGGKQALETVQRLLPVLCQAHGLTPEQVVAIA
SNIGGKQALETVQRLLPVLCQAHGLTPEQVVAIASNGGGKQALETVQRLLPVLCQAHGL
TPEQVVAIASNNGGKQALETVQRLLPVLCQAHGLTPEQVVAIASNIGGKQALETVQRLL
PVLCQAHGLTPEQVVAIASNGGGKQALETVQRLLPVLCQAHGLTPEQVVAIASNIGGKQ
ALETVQRLLPVLCQAHGLTPEQVVAIASNIGGKQALETVQRLLPVLCQAHGLTPEQVVA
IASNGGGKQALETVQRLLPVLCQAHGLTPEQVVAIASNIGGKQALETVQRLLPVLCQAH
GLTPEQVVAIASHDGGRPALESIVAQLSRPDPALAALTNDHLVALACLGGRPALDAVKK
GLPHAPALIKRTNRRIPERTSHRVAASGGGGSGGGGSNGAIGGDLLLNFPDMSVLERQR
AHLKYLNPTFDSPLAGFFADSSMITGGEMDSYLSTAGLNLPMMYGETTVEGLYPERLRR
ILTDSRLSISPETTLGTGNFKAAKFDTETKDCNEAAKKMTMNRDDLVEEGEEEKSKITEQ
NNGSTKSIKKMKHKAKKEENNFSNDSSKVTKELEKTDYIHVRARRGQATDSHSIAERVR
REKISERMKFLQDLVPGCDKITGKAGMLDEIINYVQSLQRQIEFLSMKLAIVNPRPDFDM
DDIFAKEVASTPMTVVPSPEMVLSGYSHEMVHSGYSSEMVNSGYLHVNPMQQVNTSSD
PLSCFNNGEAPSMWDSHVQNLYGNLGV
>HA-TALE(ng2, C63)-GS-iNES4-cib1-mutNLS
(SEQ ID NO: 166)
YPYDVPDYASRTRLPSPPAPSPAFSADSFSDLLRQFDPSLFNTSLFDSLPPFGA
HHTEAATGEWDEVQSGLRAADAPPPTMRVAVTAARPPRAKPAPRRRAAQPSDASPAA
QVDLRTLGYSQQQQEKIKPKVRSTVAQHHEALVGHGFTHAHIVALSQHPAALGTVAVK
YQDMIAALPEATHEAIVGVGKQWSGARALEALLTVAGELRGPPLQLDTGQLLKIAKRG
GVTAVEAVHAWRNALTGAPLNLTPEQVVAIASNGGGKQALETVQRLLPVLCQAHGLTP
EQVVAIASNNGGKQALETVQRLLPVLCQAHGLTPEQVVAIASNIGGKQALETVQRLLPV
LCQAHGLTPEQVVAIASNIGGKQALETVQRLLPVLCQAHGLTPEQVVAIASNGGGKQAL
ETVQRLLPVLCQAHGLTPEQVVAIASNNGGKQALETVQRLLPVLCQAHGLTPEQVVAIA
SNIGGKQALETVQRLLPVLCQAHGLTPEQVVAIASNGGGKQALETVQRLLPVLCQAHGL
TPEQVVAIASNNGGKQALETVQRLLPVLCQAHGLTPEQVVAIASNIGGKQALETVQRLL
PVLCQAHGLTPEQVVAIASNGGGKQALETVQRLLPVLCQAHGLTPEQVVAIASNIGGKQ
ALETVQRLLPVLCQAHGLTPEQVVAIASNIGGKQALETVQRLLPVLCQAHGLTPEQVVA
IASNGGGKQALETVQRLLPVLCQAHGLTPEQVVAIASNIGGKQALETVQRLLPVLCQAH
GLTPEQVVAIASHDGGRPALESIVAQLSRPDPALAALTNDHLVALACLGGRPALDAVKK
GLPHAPALIKRTNRRIPERTSHRVAASGGGGSGGGGSNGAIGGDLLLNFPDMSVLERQR
AHLKYLNPTFDSPLAGFFADSSMITGGEMDSYLSTAGLNLPMMYGETTVEGDSRLSISPE
TTLGTGNFKAAKFDTETKDCNEAAAAKKMTMNRDDLVEEGLYPERLRRILTEEEKSKIT
EQNNGSTKSIKKMKHKAKKEENNFSNDSSKVTKELEKTDYIHVRARRGQATDSHSIAER
VRREKISERMKFLQDLVPGCDKITGKAGMLDEIINYVQSLQRQIEFLSMKLAIVNPRPDF
DMDDIFAKEVASTPMTVVPSPEMVLSGYSHEMVHSGYSSEMVNSGYLHVNPMQQVNT
SSDPLSCFNNGEAPSMWDSHVQNLYGNLGV
>HA-TALE(ng2, C63)-GS-iNES5-cib1-mutNLS
(SEQ ID NO: 167)
YPYDVPDYASRTRLPSPPAPSPAFSADSFSDLLRQFDPSLFNTSLFDSLPPFGA
HHTEAATGEWDEVQSGLRAADAPPPTMRVAVTAARPPRAKPAPRRRAAQPSDASPAA
QVDLRTLGYSQQQQEKIKPKVRSTVAQHHEALVGHGFTHAHIVALSQHPAALGTVAVK
YQDMIAALPEATHEAIVGVGKQWSGARALEALLTVAGELRGPPLQLDTGQLLKIAKRG
GVTAVEAVHAWRNALTGAPLNLTPEQVVAIASNGGGKQALETVQRLLPVLCQAHGLTP
EQVVAIASNNGGKQALETVQRLLPVLCQAHGLTPEQVVAIASNIGGKQALETVQRLLPV
LCQAHGLTPEQVVAIASNIGGKQALETVQRLLPVLCQAHGLTPEQVVAIASNGGGKQAL
ETVQRLLPVLCQAHGLTPEQVVAIASNNGGKQALETVQRLLPVLCQAHGLTPEQVVAIA
SNIGGKQALETVQRLLPVLCQAHGLTPEQVVAIASNGGGKQALETVQRLLPVLCQAHGL
TPEQVVAIASNNGGKQALETVQRLLPVLCQAHGLTPEQVVAIASNIGGKQALETVQRLL
PVLCQAHGLTPEQVVAIASNGGGKQALETVQRLLPVLCQAHGLTPEQVVAIASNIGGKQ
ALETVQRLLPVLCQAHGLTPEQVVAIASNIGGKQALETVQRLLPVLCQAHGLTPEQVVA
IASNGGGKQALETVQRLLPVLCQAHGLTPEQVVAIASNIGGKQALETVQRLLPVLCQAH
GLTPEQVVAIASHDGGRPALESIVAQLSRPDPALAALTNDHLVALACLGGRPALDAVKK
GLPHAPALIKRTNRRIPERTSHRVAASGGGGSGGGGSNGAIGGDLLLNFPDMSVLERQR
AHLKYLNPTFDSPLAGFFADSSMITGGEMDSYLSTAGLNLPMMYGETTVEGDSRLSISPE
TTLGTGNFKAAKFDTETKDCNEAAKKMTMNRDDLVEEGEEEKSKITEQNNGSTKSIKK
LYPERLRRILTMKHKAKKEENNFSNDSSKVTKELEKTDYIHVRARRGQATDSHSIAERV
RREKISERMKFLQDLVPGCDKITGKAGMLDEIINYVQSLQRQIEFLSMKLAIVNPRPDFD
MDDIFAKEVASTPMTVVPSPEMVLSGYSHEMVHSGYSSEMVNSGYLHVNPMQQVNTS
SDPLSCFNNGEAPSMWDSHVQNLYGNLGV
>HA-TALE(ng2, C63)-GS-iNES6-cib1-mutNLS
(SEQ ID NO: 168)
YPYDVPDYASRTRLPSPPAPSPAFSADSFSDLLRQFDPSLFNTSLFDSLPPFGA
HHTEAATGEWDEVQSGLRAADAPPPTMRVAVTAARPPRAKPAPRRRAAQPSDASPAA
QVDLRTLGYSQQQQEKIKPKVRSTVAQHHEALVGHGFTHAHIVALSQHPAALGTVAVK
YQDMIAALPEATHEAIVGVGKQWSGARALEALLTVAGELRGPPLQLDTGQLLKIAKRG
GVTAVEAVHAWRNALTGAPLNLTPEQVVAIASNGGGKQALETVQRLLPVLCQAHGLTP
EQVVAIASNNGGKQALETVQRLLPVLCQAHGLTPEQVVAIASNIGGKQALETVQRLLPV
LCQAHGLTPEQVVAIASNIGGKQALETVQRLLPVLCQAHGLTPEQVVAIASNGGGKQAL
ETVQRLLPVLCQAHGLTPEQVVAIASNNGGKQALETVQRLLPVLCQAHGLTPEQVVAIA
SNIGGKQALETVQRLLPVLCQAHGLTPEQVVAIASNGGGKQALETVQRLLPVLCQAHGL
TPEQVVAIASNNGGKQALETVQRLLPVLCQAHGLTPEQVVAIASNIGGKQALETVQRLL
PVLCQAHGLTPEQVVAIASNGGGKQALETVQRLLPVLCQAHGLTPEQVVAIASNIGGKQ
ALETVQRLLPVLCQAHGLTPEQVVAIASNIGGKQALETVQRLLPVLCQAHGLTPEQVVA
IASNGGGKQALETVQRLLPVLCQAHGLTPEQVVAIASNIGGKQALETVQRLLPVLCQAH
GLTPEQVVAIASHDGGRPALESIVAQLSRPDPALAALTNDHLVALACLGGRPALDAVKK
GLPHAPALIKRTNRRIPERTSHRVAASGGGGSGGGGSNGAIGGDLLLNFPDMSVLERQR
AHLKYLNPTFDSPLAGFFADSSMITGGEMDSYLSTAGLNLPMMYGETTVEGDSRLSISPE
TTLGTGNFKAAKFDTETKDCNEAAKKMTMNRDDLVEEGEEEKSKITEQNNGSTKSIKK
MKHKAKKEENNFSNDSSKVTLYPERLRRILTKELEKTDYIHVRARRGQATDSHSIAERV
RREKISERMKFLQDLVPGCDKITGKAGMLDEIINYVQSLQRQIEFLSMKLAIVNPRPDFD
MDDIFAKEVASTPMTVVPSPEMVLSGYSHEMVHSGYSSEMVNSGYLHVNPMQQVNTS
SDPLSCFNNGEAPSMWDSHVQNLYGNLGV
>HA-TALE(ng2, C63)-NLS-cib1Δ1
(SEQ ID NO: 169)
MYPYDVPDYASRTRLPSPPAPSPAFSADSFSDLLRQFDPSLFNTSLFDSLPPFG
AHHTEAATGEWDEVQSGLRAADAPPPTMRVAVTAARPPRAKPAPRRRAAQPSDASPA
AQVDLRTLGYSQQQQEKIKPKVRSTVAQHHEALVGHGFTHAHIVALSQHPAALGTVAV
KYQDMIAALPEATHEAIVGVGKQWSGARALEALLTVAGELRGPPLQLDTGQLLKIAKR
TPEQVVAIASNNGGKQALETVQRLLPVLCQAHGLTPEQVVAIASNIGGKQALETVQRLL
PVLCQAHGLTPEQVVAIASNIGGKQALETVQRLLPVLCQAHGLTPEQVVAIASNGGGKQ
ALETVQRLLPVLCQAHGLTPEQVVAIASNNGGKQALETVQRLLPVLCQAHGLTPEQVV
AIASNIGGKQALETVQRLLPVLCQAHGLTPEQVVAIASNGGGKQALETVQRLLPVLCQA
HGLTPEQVVAIASNNGGKQALETVQRLLPVLCQAHGLTPEQVVAIASNIGGKQALETVQ
RLLPVLCQAHGLTPEQVVAIASNGGGKQALETVQRLLPVLCQAHGLTPEQVVAIASNIG
GKQALETVQRLLPVLCQAHGLTPEQVVAIASNIGGKQALETVQRLLPVLCQAHGLTPEQ
VVAIASNGGGKQALETVQRLLPVLCQAHGLTPEQVVAIASNIGGKQALETVQRLLPVLC
QAHGLTPEQVVAIASHDGGRPALESIVAQLSRPDPALAALTNDHLVALACLGGRPALDA
VKKGLPHAPALIKRTNRRIPERTSHRVAASSPKKKRKVEASNGAIGGDLLLNFPDMSVLE
RQRAHLKYLNPTFDSPLAGFFADSSMITGGEMDSYLSTAGLNLPMMYGETTVEGDSRLS
ISPETTLGTGNFKKRKFDTETKDCNEKKKKMTMNRDDLVEEGEEEKSKITEQNNGSTKS
IKKMKHKAKKEENNFSNDSSKVTKELEKTDYIHVRARRGQATDSHSIAERVRREKISER
MKFLQDLVPGCDKITGKAGMLDEIINYVQSLQRGGSVASTPMTVVPSPEMVLSGYSHE
MVHSGYSSEMVNSGYLHVNPMQQVNTSSDPLSCFNNGEAPSMWDSHVQNLYGNLGV
>HA-TALE(ng2, C63)-NLS-cib1Δ2
(SEQ ID NO: 170)
YPYDVPDYASRTRLPSPPAPSPAFSADSFSDLLRQFDPSLFNTSLFDSLPPFGA
HHTEAATGEWDEVQSGLRAADAPPPTMRVAVTAARPPRAKPAPRRRAAQPSDASPAA
QVDLRTLGYSQQQQEKIKPKVRSTVAQHHEALVGHGFTHAHIVALSQHPAALGTVAVK
YQDMIAALPEATHEAIVGVGKQWSGARALEALLTVAGELRGPPLQLDTGQLLKIAKRG
GVTAVEAVHAWRNALTGAPLNLTPEQVVAIASNGGGKQALETVQRLLPVLCQAHGLTP
EQVVAIASNNGGKQALETVQRLLPVLCQAHGLTPEQVVAIASNIGGKQALETVQRLLPV
LCQAHGLTPEQVVAIASNIGGKQALETVQRLLPVLCQAHGLTPEQVVAIASNGGGKQAL
ETVQRLLPVLCQAHGLTPEQVVAIASNNGGKQALETVQRLLPVLCQAHGLTPEQVVAIA
SNIGGKQALETVQRLLPVLCQAHGLTPEQVVAIASNGGGKQALETVQRLLPVLCQAHGL
TPEQVVAIASNNGGKQALETVQRLLPVLCQAHGLTPEQVVAIASNIGGKQALETVQRLL
PVLCQAHGLTPEQVVAIASNGGGKQALETVQRLLPVLCQAHGLTPEQVVAIASNIGGKQ
ALETVQRLLPVLCQAHGLTPEQVVAIASNIGGKQALETVQRLLPVLCQAHGLTPEQVVA
IASNGGGKQALETVQRLLPVLCQAHGLTPEQVVAIASNIGGKQALETVQRLLPVLCQAH
GLTPEQVVAIASHDGGRPALESIVAQLSRPDPALAALTNDHLVALACLGGRPALDAVKK
GLPHAPALIKRTNRRIPERTSHRVAASSPKKKRKVEASNGAIGGDLLLNFPDMSVLERQR
AHLKYLNPTFDSPLAGFFADSSMITGGEMDSYLSTAGLNLPMMYGETTVEGDSRLSISPE
TTLGTGNFKKRKFDTETKDCNEKKKKMTMNRDDLVEEGEEEKSKITEQNNGSTKSIKK
MKHKAKKEENNFSNDSSKVTKELEKTDYIHVRARRGQATDSHSIAERVRREKISERMKF
LQDLVPGCDKITGKAGMLDEIINYVQSLQRQIEFLSMKLAIVNPRPDFDMDDIFAKEVAS
TPMTVVPSPEMVLSGYGGSPLSCFNNGEAPSMWDSHVQNLYGNLGV
>alpha-importin-NLS-CRY2PHR-NLS-VP64_2A_GFP
(SEQ ID NO: 171)
MKRPAATKKAGQAKKKKKMDKKTIVWFRRDLRIEDNPALAAAAHEGSVFP
VFIWCPEEEGQFYPGRASRWWMKQSLAHLSQSLKALGSDLTLIKTHNTISAILDCIRVTG
ATKVVFNHLYDPVSLVRDHTVKEKLVERGISVQSYNGDLLYEPWEIYCEKGKPFTSFNS
YWKKCLDMSIESVMLPPPWRLMPITAAAEAIWACSIEELGLENEAEKPSNALLTRAWSP
GWSNADKLLNEFIEKQLIDYAKNSKKVVGNSTSLLSPYLHFGEISVRHVFQCARMKQH
WARDKNSEGEESADLFLRGIGLREYSRYICFNFPFTHEQSLLSHLRFFPWDADVDKFKA
WRQGRTGYPLVDAGMRELWATGWMHNRIRVIVSSFAVKFLLLPWKWGMKYFWDTLL
DADLECDILGWQYISGSIPDGHELDRLDNPALQGAKYDPEGEYIRQWLPELARLPTEWIH
HPWDAPLTVLKASGVELGTNYAKPIVDIDTARELLAKAISRTREAQIMIGAAPASPKKKR
KVEASGSGRADALDDFDLDMLGSDALDDFDLDMLGSDALDDFDLDMLGSDALDDFDL
DMLINSRGSGEGRGSLLTCGDVEENPGPVSKGEELFTGVVPILVELDGDVNGHKFSVSG
EGEGDATYGKLTLKFICTTGKLPVPWPTLVTTLTYGVQCFSRYPDHMKQHDFFKSAMP
EGYVQERTIFFKDDGNYKTRAEVKFEGDTLVNRIELKGIDFKEDGNILGHKLEYNYNSH
NVYIMADKQKNGIKVNFKIRHNIEDGSVQLADHYQQNTPIGDGPVLLPDNHYLSTQSAL
SKDPNEKRDHMVLLEFVTAAGITLGMDELYKV
>mutNES-CRY2PHR-NLS-VP64_2A_GFP
(SEQ ID NO: 172)
MEQKLISEEDLKMDKKTIVWFRRDLRIEDNPALAAAAHEGSVFPVFIWCPEEE
GQFYPGRASRWWMKQSLAHLSQSLKAAGSDATLIKTHNTISAILDCIRVTGATKVVFNH
LYDPVSLVRDHTVKEKLVERGISVQSYNGDLLYEPWEIYCEKGKPFTSFNSYWKKCLD
MSIESVMLPPPWRLMPITAAAEAIWACSIEELGLENEAEKPSNALLTRAWSPGWSNADK
LLNEFIEKQLIDYAKNSKKVVGNSTSLLSPYLHFGEISVRHVFQCARMKQIIWARDKNSE
GEESADLFLRGIGLREYSRYICFNFPFTHEQSLLSHLRFFPWDADVDKFKAWRQGRTGYP
LVDAGMRELWATGWMHNRIRVIVSSFAVKFLLLPWKWGMKYFWDTLLDADLECDILG
WQYISGSIPDGHELDRLDNPALQGAKYDPEGEYIRQWLPELARLPTEWIHHPWDAPLTV
LKASGVELGTNYAKPIVDIDTARELLAKAISRTREAQIMIGAAPASPKKKRKVEASGSGR
ADALDDFDLDMLGSDALDDFDLDMLGSDALDDFDLDMLGSDALDDFDLDMLINSRGS
GEGRGSLLTCGDVEENPGPVSKGEELFTGVVPILVELDGDVNGHKFSVSGEGEGDATYG
KLTLKFICTTGKLPVPWPTLVTTLTYGVQCFSRYPDHMKQHDFFKSAMPEGYVQERTIF
FKDDGNYKTRAEVKFEGDTLVNRIELKGIDFKEDGNILGHKLEYNYNSHNVYIMADKQ
KNGIKVNFKIRHNIEDGSVQLADHYQQNTPIGDGPVLLPDNHYLSTQSALSKDPNEKRD
HMVLLEFVTAAGITLGMDELYKV
>CRY2PHR-NLS-VP64-NLS_2A_GFP
(SEQ. ID NO: 173)
MKMDKKTIVWFRRDLRIEDNPALAAAAHEGSVFPVFIWCPEEEGQFYPGRAS
RWWMKQSLAHLSQSLKALGSDLTLIKTHNTISAILDCIRVTGATKVVFNHLYDPVSLVR
DHTVKEKLVERGISVQSYNGDLLYEPWEIYCEKGKPFTSFNSYWKKCLDMSIESVMLPP
PWRLMPITAAAEAIWACSIEELGLENEAEKPSNALLTRAWSPGWSNADKLLNEFIEKQLI
DYAKNSKKVVGNSTSLLSPYLHFGEISVRHVFQCARMKQIIWARDKNSEGEESADLFLR
GIGLREYSRYICFNFPFTHEQSLLSHLRFFPWDADVDKFKAWRQGRTGYPLVDAGMREL
WATGWMHNRIRVIVSSFAVKFLLLPWKWGMKYFWDTLLDADLECDILGWQYISGSIPD
GHELDRLDNPALQGAKYDPEGEYIRQWLPELARLPTEWIHHPWDAPLTVLKASGVELG
TNYAKPIVDIDTARELLAKAISRTREAQIMIGAAPASPKKKRKVEASGSGRADALDDFDL
DMLGSDALDDFDLDMLGSDALDDFDLDMLGSDALDDFDLDMLINSRKKKRKVEASSR
GSGEGRGSLLTCGDVEENPGPVSKGEELFTGVVPILVELDGDVNGHKFSVSGEGEGDAT
YGKLTLKFICTTGKLPVPWPTLVTTLTYGVQCFSRYPDHMKQHDFFKSAMPEGYVQER
TIFFKDDGNYKTRAEVKFEGDTLVNRIELKGIDFKEDGNILGHKLEYNYNSHNVYIMAD
KQKNGIKVNFKIRHNIEDGSVQLADHYQQNTPIGDGPVLLPDNHYLSTQSALSKDPNEK
RDHMVLLEFVTAAGITLGMDELYKV
>Neurog2-TALE(N240, C63)-PYL
(SEQ ID NO: 174)
MSRTRLPSPPAPSPAFSADSFSDLLRQFDPSLFNTSLFDSLPPFGAHHTEAATG
EWDEVQSGLRAADAPPPTMRVAVTAARPPRAKPAPRRRAAQPSDASPAAQVDLRTLGY
SQQQQEKIKPKVRSTVAQHHEALVGHGFTHAHIVALSQHPAALGTVAVKYQDMIAALP
EATHEAIVGVGKQWSGARALEALLTVAGELRGPPLQLDTGQLLKIAKRGGVTAVEAVH
AWRNALTGAPLNLTPEQVVAIASHNGGKQALETVQRLLPVLCQAHGLTPEQVVAIASNI
GGKQALETVQRLLPVLCQAHGLTPEQVVAIASNIGGKQALETVQRLLPVLCQAHGLTPE
QVVAIASNGGGKQALETVQRLLPVLCQAHGLTPEQVVAIASHNGGKQALETVQRLLPV
LCQAHGLTPEQVVAIASNIGGKQALETVQRLLPVLCQAHGLTPEQVVAIASNGGGKQAL
ETVQRLLPVLCQAHGLTPEQVVAIASHNGGKQALETVQRLLPVLCQAHGLTPEQVVAIA
SNIGGKQALETVQRLLPVLCQAHGLTPEQVVAIASNGGGKQALETVQRLLPVLCQAHGL
TPEQVVAIASNIGGKQALETVQRLLPVLCQAHGLTPEQVVAIASNIGGKQALETVQRLLP
VLCQAHGLTPEQVVAIASNGGGRPALESIVAQLSRPDPALAALTNDHLVALACLGGRPA
LDAVKKGLPHAPALIKRTNRRIPERTSHRVAASMANSESSSSPVNEEENSQRISTLHHQT
MPSDLTQDEFTQLSQSIAEFHTYQLGNGRCSSLLAQRIHAPPETVWSVVRRFDRPQIYKH
FIKSCNVSEDFEMRVGCTRDVNVISGLPANTSRERLDLLDDDRRVTGFSITGGEHRLRNY
KSVTTVHRFEKEEEEERIWTVVLESYVVDVPEGNSEEDTRLFADTVIRLNLQKLASITEA
NMRNNNNNNSSQVR
>ABI-NLS-VP64
(SEQ ID NO: 175)
MVPLYGFTSICGRRPEMEAAVSTIPRFLQSSSGSMLDGRFDPQSAAHFFGVYD
GHGGSQVANYCRERMHLALAEEIAKEKPMLCDGDTWLEKWKKALFNSFLRVDSEIESV
APETVGSTSVVAVVFPSHIFVANCGDSRAVLCRGKTALPLSVDHKPDREDEAARIEAAG
GKVIQWNGARVFGVLAMSRSIGDRYLKPSIIPDPEVTAVKRVKEDDCLILASDGVWDV
MTDEEACEMARKRILLWHKKNAVAGDASLLADERRKEGKDPAAMSAAEYLSKLAIQR
GSKDNISVVVVDLKPRRKLKSKPLNASPKKKRKVEASGSGRADALDDFDLDMLGSDAL
DDFDLDMLGSDALDDFDLDMLGSDALDDFDLDMLIN
>hSpCas9(D10A,H840A)-Linker-NLS-VP64
(SEQ ID NO: 176)
MDKKYSIGLAIGTNSVGWAVITDEYKVPSKKFKVLGNTDRHSIKKNLIGALLF
DSGETAEATRLKRTARRRYTRRKNRICYLQEIFSNEMAKVDDSFFHRLEESFLVEEDKK
HERHPIFGNIVDEVAYHEKYPTIYHLRKKLVDSTDKADLRLIYLALAHMIKFRGHFLIEG
DLNPDNSDVDKLFIQLVQTYNQLFEENPINASGVDAKAILSARLSKSRRLENLIAQLPGE
KKNGLFGNLIALSLGLTPNFKSNFDLAEDAKLQLSKDTYDDDLDNLLAQIGDQYADLFL
AAKNLSDAILLSDILRVNTEITKAPLSASMIKRYDEHHQDLTLLKALVRQQLPEKYKEIFF
DQSKNGYAGYIDGGASQEEFYKFIKPILEKMDGTEELLVKLNREDLLRKQRTFDNGSIPH
QIHLGELHAILRRQEDFYPFLKDNREKIEKILTFRIPYYVGPLARGNSRFAWMTRKSEETI
TPWNFEEVVDKGASAQSFIERMTNFDKNLPNEKVLPKHSLLYEYFTVYNELTKVKYVTE
GMRKPAFLSGEQKKAIVDLLFKTNRKVTVKQLKEDYFKKIECFDSVEISGVEDRFNASL
GTYHDLLKIIKDKDFLDNEENEDILEDIVLTLTLFEDREMIEERLKTYAHLFDDKVMKQL
KRRRYTGWGRLSRKLINGIRDKQSGKTILDFLKSDGFANRNFMQLIHDDSLTFKEDIQKA
QVSGQGDSLHEHIANLAGSPAIKKGILQTVKVVDELVKVMGRHKPENIVIEMARENQTT
QKGQKNSRERMKRIEEGIKELGSQILKEHPVENTQLQNEKLYLYYLQNGRDMYVDQEL
DINRLSDYDVDAIVPQSFLKDDSIDNKVLTRSDKNRGKSDNVPSEEVVKKMKNYWRQL
LNAKLITQRKFDNLTKAERGGLSELDKAGFIKRQLVETRQITKHVAQILDSRMNTKYDE
NDKLIREVKVITLKSKLVSDFRKDFQFYKVREINNYHHAHDAYLNAVVGTALIKKYPKL
ESEFVYGDYKVYDVRKMIAKSEQEIGKATAKYFFYSNIMNFFKTEITLANGEIRKRPLIET
NGETGEIVWDKGRDFATVRKVLSMPQVNIVKKTEVQTGGFSKESILPKRNSDKLIARKK
DWDPKKYGGFDSPTVAYSVLVVAKVEKGKSKKLKSVKELLGITIMERSSFEKNPIDFLE
AKGYKEVKKDLIIKLPKYSLFELENGRKRMLASAGELQKGNELALPSKYVNFLYLASHY
EKLKGSPEDNEQKQLFVEQHKHYLDEIIEQISEFSKRVILADANLDKVLSAYNKHRDKPI
REQAENIIHLFTLTNLGAPAAFKYFDTTIDRKRYTSTKEVLDATLIHQSITGLYETRIDLSQ
LGGDSAGGGGSGGGGSGGGGSGPKKKRKVAAAGSGRADALDDFDLDMLGSDALDDF
DLDMLGSDALDDFDLDMLGSDALDDFDLDMLIN

[chemical structure]

(SEQ ID NO: 177)
MGSGMNIQMLLEAADYLERREREAEHGYASMLPGSGMNIQMLLEAADYLE
RREREAEHGYASMLPGSGMNIQMLLEAADYLERREREAEHGYASMLPGSGNMIQMLL

[chemical structure]

PECGKSFSQSGALTRHQRTHTRDKKYSIGLAIGTNSVGWAVITDEYKVPSKKFKVLGNT
DRHSIKKNLIGALLFDSGETAEATRLKRTARRRYTRRKNRICYLQEIFSNEMAKVDDSFF
HRLEESFLVEEDKKHERHPIFGNIVDEVAYHEKYPTIYHLRKKLVDSTDKADLRLIYLAL
AHMIKFRGHFLIEGDLNPDNSDVDKLFIQLVQTYNQLFEENPINASGVDAKAILSARLSK
SRRLENLIAQLPGEKKNGLFGNLIALSLGLTPNFKSNFDLAEDAKLQLSKDTYDDDLDNL
LAQIGDQYADLFLAAKNLSDAILLSDILRVNTEITKAPLSASMIKRYDEHHQDLTLLKAL
VRQQLPEKYKEIFFDQSKNGYAGYIDGGASQEEFYKFIKPILEKMDGTEELLVKLNREDL
LRKQRTFDNGSIPHQIHLGELHAILRRQEDFYPFLKDNREKIEKILTFRIPYYVGPLARGNS
RFAWMTRKSEETITPWNFEEVVDKGASAQSFIERMTNFDKNLPNEKVLPKHSLLYEYFT
VYNELTKVKYVTEGMRKPAFLSGEQKKAIVDLLFKTNRKVTVKQLKEDYFKKIECFDS
VEISGVEDRFNASLGTYHDLLKIIKDKDFLDNEENEDILEDIVLTLTLFEDREMIEERLKT
YAHLFDDKVMKQLKRRRYTGWGRLSRKLINGIRDKQSGKTILDFLKSDGFANRNFMQL
IHDDSLTFKEDIQKAQVSGQGDSLHEHIANLAGSPAIKKGILQTVKVVDELVKVMGRHK
PENIVIEMARENQTTQKGQKNSRERMKRIEEGIKELGSQILKEHPVENTQLQNEKLYLYY
LQNGRDMYVDQELDINRLSDYDVDAIVPQSFLKDDSIDNKVLTRSDKNRGKSDNVPSEE
VVKKMKNYWRQLLNAKLITQRKFDNLTKAERGGLSELDKAGFIKRQLVETRQITKHVA
QILDSRMNTKYDENDKLIREVKVITLKSKLVSDFRKDFQFYKVREINNYHHAHDAYLNA
VVGTALIKKYPKLESEFVYGDYKVYDVRKMIAKSEQEIGKATAKYFFYSNIMNFFKTEIT
LANGEIRKRPLIETNGETGEIVWDKGRDFATVRKVLSMPQVNIVKKTEVQTGGFSKESIL
PKRNSDKLIARKKDWDPKKYGGFDSPTVAYSVLVVAKVEKGKSKKLKSVKELLGITIM
ERSSFEKNPIDFLEAKGYKEVKKDLIIKLPKYSLFELENGRKRMLASAGELQKGNELALP
SKYVNFLYLASHYEKLKGSPEDNEQKQLFVEQHKHYLDEIIEQISEFSKRVILADANLDK
VLSAYNKHRDKPIREQAENIIHLFTLTNLGAPAAFKYFDTTIDRKRYTSTKEVLDATLIHQ
SITGLYETRIDLSQLGGDKRPAATKKAGQAKKKK
Epigenetic effector domain sequences
>hs_NCoR
(SEQ ID NO: 178)
ASSPKKKRKVEASMNGLMEDPMKVYKDRQFMNVWTDHEKEIFKDKFIQHP
KNFGLIASYLERKSVPDCVLYYYLTKKNENYKEF
>pf_Sir2A
(SEQ ID NO: 179)
ASSPKKKRKVEASMGNLMISFLKKDTQSITLEELAKIIKKCKHVVALTGSGTS
AESNIPSFRGSSNSIWSKYDPRIYGTIWGFWKYPEKIWEVIRDISSDYEIEINNGHVALSTL
ESLGYLKSVVTQNVDGLHEASGNTKVISLHGNVFEAVCCTCNKIVKLNKIMLQKTSHFM
HQLPPECPCGGIFKPNIILFGEVVSSDLLKEAEEEIAKCDLLLVIGTSSTVSTATNLCHFAC
KKKKKIVEINISKTYITNKMSDYHVCAKFSELTKVANILKGSSEKNKKIMEF
>nc_DIM5
(SEQ ID NO: 180)
ASSPKKKRKVEASMEKAFRPHFFNHGKPDANPKEKKNCHWCQIRSFATHAQ
LPISIVNREDDAFLNPNFRFIDHSIIGKNVPVADQSFRVGCSCASDEECMYSTCQCLDEMA
PDSDEEADPYTRKKRFAYYSQGAKKGLLRDRVLQSQEPIYECHQGCACSKDCPNRVVE
RGRTVPLQIFRTKDRGWGVKCPVNIKRGQFVDRYLGEIITSEEADRRRAESTIARRKDVY
LFALDKFSDPDSLDPLLAGQPLEVDGEYMSGPTRFINHSCDPNMAIFARVGDHADKHIH
DLALFAIKDIPKGTELTFDYVNGLTGLESDAHDPSKISEMTKCLCGTAKCRGYLWEF
>sc_HST2
(SEQ ID NO: 181)
ASSPKKKRKVEASTEMSVRKIAAHMKSNPNAKVIFMVGAGISTSCGIPDFRSP
GTGLYHNLARLKLPYPEAVFDVDFFQSDPLPFYTLAKELYPGNFRPSKFHYLLKLFQDK
DVLKRVYTQNIDTLERQAGVKDDLIIEAHGSFAHCHCIGCGKVYPPQVFKSKLAEHPIKD
FVKCDVCGELVKPAIVFFGEDLPDSFSETWLNDSEWLREKITTSGKHPQQPLVIVVGTSL
AVYPFASLPEEIPRKVKRVLCNLETVGDFKANKRPTDLIVHQYSDEFAEQLVEELGWQE
DFEKILTAQGGMGEF
>hs_SIRT3
(SEQ ID NO: 182)
ASSPKKKRKVEASMVGAGISTPSGIPDFRSPGSGLYSNLQQYDLPYPEAIFELP
FFFHNPKPFFTLAKELYPGNYKPNVTHYFLRLLHDKGLLLRLYTQNIDGLERVSGIPASK
LVEAHGTFASATCTVCQRPFPGEDIRADVMADRVPRCPVCTGVVKPDIVFFGEPLPQRFL
LHVVDFPMADLLLILGTSLEVEPFASLTEAVRSSVPRLLINRDLVGPLAWHPRSRDVAQL
GDVVHGVESLVELLGWTEEMRDLVQRETGKLDGPDKEF
>hs_NIPP1
(SEQ ID NO: 183)
ASSPKKKRKVEASMAAAANSGSSLPLFDCPTWAGKPPPGLHLDVVKGDKLIE
KLIIDEKKYYLFGRNPDLCDFTIDHQSCSRVHAALVYHKHLKRVFLIDLNSTHGTFLGHI
RLEPHKPQQIPIDSTVSFGASTRAYTLREKPQTLPSAVKGDEKMGGEDDELKGLLGLPEE
ETELDNLTEFNTAHNKRISTLTIEEGNLDIQRPKRKRKNSRVTFSEDDEIINPEDVDPSVGR
FRNMVQTAVVPVKKKRVEGPGSLGLEESGSRRMQNFAFSGGLYGGLPPTHSEAGSQPH
GIHGTALIGGLPMPYPNLAPDVDLTPVVPSAVNMNPAPNPAVYNPEAVNEEF
>ct_NUE
(SEQ ID NO: 184)
ASSPKKKRKVEASMTTNSTQDTLYLSLHGGIDSAIPYPVRRVEQLLQFSFLPE
LQFQNAAVKQRIQRLCYREEKRLAVSSLAKWLGQLHKQRLRAPKNPPVAICWINSYVG
YGVFARESIPAWSYIGEYTGILRRRQALWLDENDYCFRYPVPRYSFRYFTIDSGMQGNV
TRFINHSDNPNLEAIGAFENGIFHIIIRAIKDILPGEELCYHYGPLYWKHRKKREEFVPQEEEF
>hs_MBD2b
(SEQ ID NO: 185)
ASSPKKKRKVEASARYLGNTVDLSSFDFRTGKMMPSKLQKNKQRLRNDPLN
QNKGKPDLNTTLPIRQTASIFKQPVTKVTNHPSNKVKSDPQRMNEQPRQLFWEKRLQGL
WLNTSQPLCKAFIVTDEDIRKQEERVQQVRKILEDALMADILSRAADTEEMDIEMDSGD
EAEF
>ca_HST2
(SEQ ID NO: 186)
ASSPKKKRKVEASMPSLDDILKPVAEAVKNGKKVTFFNGAGISTGAGIPDFRS
PDTGLYANLAKLNLPFAEAVFDIDFFKEDPKPFYTLAEELYPGNFAPTKFHHFIKLLQDQ
GSLKRVYTQNIDTLERLAGVEDKYIVEAHGSFASNHCVDCHKEMTTETLKTYMKDKKI
PSCQHCEGYVKPDIVFFGEGLPVKFFDLWEDDCEDVEVAIVAGTSLTVFPFASLPGEVNK
KCLRVLVNKEKVGTFKHEPRKSDIIALHDCDIVAERLCTLLGLDDKLNEVYEKEKIKYSK
AETKEIKMHEIEDKLKEEAHLKEDKHTTKVDKKEKQNDANDKELEQLIDKAKAEF
>hs_PHF19
(SEQ ID NO: 187)
ASSPKKKRKVEASMENRALDPGTRDSYGATSHLPNKGALAKVKNNFKDLMS
KLTEGQYVLCRWTDGLYYLGKIKRVSSSKQSCLVTFEDNSKYWVLWKDIQHAGVPGEE
PKCNICLGKTSGPLNEILICGKCGLGYHQQCHIPIAGSADQPLLTPWFCRRCIFALAVRKG
GALKKGAIARTLQAVKMVLSYQPEELEWDSPHRTNQQQCYCYCGGPGEWYLRMLQCY
RCRQWFHEACTQCLNEPMMFGDRFYLFFCSVCNQGPGGSGSDSSAEGASVPERPDEGID
SHTFESISEDDSSLSHLKSSITNYFGAAGRLACGEKYQVLARRVTPEGKVQYLVEWEGTT
PYEF
>hs_HDAC11
(SEQ ID NO: 188)
ASSPKKKRKVEASMLHTTQLYQHVPETRWPIVYSPRYNITFMGLEKLHPFDA
GKWGKVINFLKEEKLLSDSMLVEAREASEEDLLVVHTRRYLNELKWSFAVATITEIPPVI
FLPNFLVQRKVLRPLRTQTGGTIMAGKLAVERGWAINVGGGFHHCSSDRGGGFCAYAD
ITLAIKFLFERVEGISRATIIDLDAHQGNGHERDFMDDKRVYIMDVYNRHIYPGDRFAKQ
AIRRKVELEWGTEDDEYLDKVERNIKKSLQEHLPDVVVYNAGTDILEGDRLGGLSISPA
GIVKRDELVFRMVRGRRVPILMVTSGGYQKRTARIIADSILNLFGLGLIGPESPSVSAQNS
DTPLLPPAVPEF
>ml_MesoLo4
(SEQ ID NO: 189)
ASSPKKKRKVEASMPLQIVHHPDYDAGFATNHRFPMSKYPLLMEALRARGL
ASPDALNTTEPAPASWLKLAHAADYVDQVISCSVPEKIEREIGFPVGPRVSLRAQLATGG
TILAARLALRHGIACNTAGGSHHARRAQGAGFCTFNDVAVASLVLLDEGAAQNILVVD
LDVHQGDGTADILSDEPGVFTFSMHGERNYPVRKIASDLDIALPDGTGDAAYLRRLATIL
PELSARARWDIVFYNAGVDVHAEDRLGRLALSNGGLRARDEMVIGHFRALGIPVCGVI
GGGYSTDVPALASRHAILFEVASTYAEF
>pbcv1_vSET
(SEQ ID NO: 190)
ASSPKKKRKVEASMFNDRVIVKKSPLGGYGVFARKSFEKGELVEECLCIVRH
NDDWGTALEDYLFSRKNMSAMALGFGAIFNHSKDPNARHELTAGLKRMRIFTIKPIAIG
EEITISYGDDYWLSRPRLTQNEF
>at_KYP
(SEQ ID NO: 191)
ASSPKKKRKVEASDISGGLEFKGIPATNRVDDSPVSPTSGFTYIKSLIIEPNVIIP
KSSTGCNCRGSCTDSKKCACAKLNGGNFPYVDLNDGRLIESRDVVFECGPHCGCGPKC
VNRTSQKRLRFNLEVFRSAKKGWAVRSWEYIPAGSPVCEYIGVVRRTADVDTISDNEYI
FEIDCQQTMQGLGGRQRRLRDVAVPMNNGVSQSSEDENAPEFCIDAGSTGNFARFINHS
CEPNLFVQCVLSSHQDIRLARVVLFAADNISPMQELTYDYGYALDSVHEF
>tg_TgSET8
(SEQ ID NO: 192)
ASSPKKKRKVEASASRRTGEFLRDAQAPSRWLKRSKTGQDDGAFCLETWLA
GAGDDAAGGERGRDREGAADKAKQREERRQKELEERFEEMKVEFEEKAQRMIARRAA
LTGEIYSDGKGSKKPRVPSLPENDDDALIEIIIDPEQGILKWPLSVMSIRQRTVIYQECLRR
DLTACIHLTKVPGKGRAVFAADTILKDDFVVEYKGELCSEREAREREQRYNRSKVPMGS
FMFYFKNGSRMMAIDATDEKQDFGPARLINHSRRNPNMTPRAITLGDFNSEPRLIFVARR
NIEKGEELLVDYGERDPDVIKEHPWLNSEF
>hs_SIRT6
(SEQ ID NO: 193)
ASSPKKKRKVEASMSVNYAAGLSPYADKGKCGLPEIFDPPEELERKVWELAR
LVWQSSSVVFHTGAGISTASGIPDFRGPHGVWTMEERGLAPKFDTTFESARPTQTHMAL
VQLERVGLLRFLVSQNVDGLHVRSGFPRDKLAELHGNMFVEECAKCKTQYVRDTVVG
TMGLKATGRLCTVAKARGLRACRGELRDTILDWEDSLPDRDLALADEASRNADLSITL
GTSLQIRPSGNLPLATKRRGGRLVIVNLQPTKHDRHADLRIHGYVDEVMTRLMKHLGLE
IPAWDGPRVLERALPPLEF
>ce_Set1
(SEQ ID NO: 194)
ASSPKKKRKVEASMKVAAKKLATSRMRKDRAAAASPSSDIENSENPSSLASH
SSSSGRMTPSKNTRSRKGVSVKDVSNHKITEFFQVRRSNRKTSKQISDEAKHALRDTVL
KGTNERLLEVYKDVVKGRGIRTKVNFEKGDFVVEYRGVMMEYSEAKVIEEQYSNDEEI
GSYMYFFEHNNKKWCIDATKESPWKGRLINHSVLRPNLKTKVVEIDGSHHLILVARRQI
AQGEELLYDYGDRSAETIAKNPWLVNTEF
>mm_G9a
(SEQ ID NO: 195)
ASSPKKKRKVEASVRTEKIICRDVARGYENVPIPCVNGVDGEPCPEDYKYISE
NCETSTMNIDRNITHLQHCTCVDDCSSSNCLCGQLSIRCWYDKDGRLLQEFNKIEPPLIFE
CNQACSCWRSCKNRVVQSGIKVRLQLYRTAKMGWGVRALQTIPQGTFICEYVGELISD
AEADVREDDSYLFDLDNKDGEVYCIDARYYGNISRFINHLCDPNIIPVRVFMLHQDLRFP
RIAFFSSRDIRTGEELGFDYGDRFWDIKSKYFTCQCGSEKCKHSAEAIALEQSRLARLDP
HPELLPDLSSLPPINTEF
>hs_SIRT5
(SEQ ID NO: 196)
ASSPKKKRKVEASSSSMADFRKFFAKAKHIVIISGAGVSAESGVPTFRGAGGY
WRKWQAQDLATPLAFAHNPSRVWEFYHYRREVMGSKEPNAGHRAIAECETRLGKQGR
RVVVITQNIDELHRKAGTKNLLEIHGSLFKTRCTSCGVVAENYKSPICPALSGKGAPEPG
TQDASIPVEKLPRCEEAGCGGLLRPHVVWFGENLDPAILEEVDRELAHCDLCLVVGTSS
VVYPAAMFAPQVAARGVPVAEFNTETTPATNRFRFHFQGPCGTTLPEALACHENETVSEF
>x1_HDAC8
(SEQ ID NO: 197)
ASSPKKKRKVEASMSRVVKPKVASMEEMAAFHTDAYLQHLHKVSEEGDND
DPETLEYGLGYDCPITEGIYDYAAAVGGATLTAAEQLIEGKTRIAVNWPGGWHHAKKD
EASGFCYLNDAVLGILKLREKFDRVLYVDMDLHHGDGVEDAFSFTSKVMTVSLHKFSP
GFFPGTGDVSDIGLGKGRYYSINVPLQDGIQDDKYYQICEGVLKEVFTTFNPEAVVLQLG
ADTIAGDPMCSFNMTPEGIGKCLKYVLQWQLPTLILGGGGYHLPNTARCWTYLTALIVG
RTLSSEIPDHEFFTEYGPDYVLEITPSCRPDRNDTQKVQEILQSIKGNLKRVVEF
>mm_HP1a
(SEQ ID NO: 198)
ASSPKKKRKVEASMKEGENNKPREKSEGNKRKSSFSNSADDIKSKKKREQSN
DIARGFERGLEPEKIIGATDSCGDLMFLMKWKDTDEADLVLAKEANVKCPQIVIAFYEE
RLTWHAYPEDAENKEKESAKSEF
>at_HDT1
(SEQ ID NO: 199)
ASSPKKKRKVEASMEFWGIEVKSGKPVTVTPEEGILIHVSQASLGECKNKKG
EFVPLHVKVGNQNLVLGTLSTENIPQLFCDLVFDKEFELSHTWGKGSVYFVGYKTPNIEP
QGYSEEEEEEEEEVPAGNAAKAVAKPKAKPAEVKPAVDDEEDESDSDGMDEDDSDGE
DSEEEEPTPKKPASSKKRANETTPKAPVSAKKAKVAVTPQKTDEKKKGGKAANQSEF
>mm_SA11
(SEQ ID NO: 200)
ASSPKKKRKVEASMSRRKQAKPQHFQSDPEVASLPRRDGDTEKGQPSRPTKS
KDAHVCGRCCAEFFELSDLLLHKKSCTKNQLVLIVNESPASPAKTFPPGPSLNDEF
>hs_SETD8
(SEQ ID NO: 201)
ASSPKKKRKVEASSCDSTNAAIAKQALKKPIKGKQAPRKKAQGKTQQNRKL
TDFYPVRRSSRKSKAELQSEERKRIDELIESGKEEGMKIDLIDGKGRGVIATKQFSRGDFV
VEYHGDLIEITDAKKREALYAQDPSTGCYMYYFQYLSKTYCVDATRETNRLGRLINHSK
CGNCQTKLHDIDGVPHLILIASRDIAAGEELLYDYGDRSKASIEAFPWLKHEF
>sc_RPD3
(SEQ ID NO: 202)
ASSPKKKRKVEASRRVAYFYDADVGNYAYGAGHPMKPHRIRMAHSLIMNY
GLYKKMEIYRAKPATKQEMCQFHTDEYIDFLSRVTPDNLEMFKRESVKFNVGDDCPVF
DGLYEYCSISGGGSMEGAARLNRGKCDVAVNYAGGLHHAKKSEASGFCYLNDIVLGIIE
LLRYHPRVLYIDIDVHHGDGVEEAFYTTDRVMTCSFHKYGEFFPGTGELRDIGVGAGKN
YAVNVPLRDGIDDATYRSVFEPVIKKIMEWYQPSAVVLQCGGDSLSGDRLGCFNLSME
GHANCVNYVKSFGIPMMVVGGGGYTMRNVARTWCFETGLLNNVVLDKDLPYEF
>ec_CobB
(SEQ ID NO: 203)
ASSPKKKRKVEASMEKPRVLVLTGAGISAESGIRTFRAADGLWEEHRVEDVA
TPEGFDRDPELVQAFYNARRRQLQQPEIQPNAAHLALAKLQDALGDRFLLVTQNIDNLH
ERAGNTNVIHMHGELLKVRCSQSGQVLDWTGDVTPEDKCHCCQFPAPLRPHVVWFGE
MPLGMDEIYMALSMADIFIAIGTSGHVYPAAGFVHEAKLHGAHTVELNLEPSQVGNEFA
EKYYGPASQVVPEFVEKLLKGLKAGSIAEF
>hs_SUV39H1
(SEQ ID NO: 204)
ASSPKKKRKVEASNLKCVRILKQFHKDLERELLRRHHRSKTPRHLDPSLANY
LVQKAKQRRALRRWEQELNAKRSHLGRITVENEVDLDGPPRAFVYINEYRVGEGITLNQ
VAVGCECQDCLWAPTGGCCPGASLHKFAYNDQGQVRLRAGLPIYECNSRCRCGYDCP
NRVVQKGIRYDLCIFRTDDGRGWGVRTLEKIRKNSFVMEYVGEIITSEEAERRGQIYDRQ
GATYLFDLDYVEDVYTVDAAYYGNISHFVNHSCDPNLQVYNVFIDNLDERLPRIAFFAT
RTIRAGEELTFDYNMQVDPVDMESTRMDSNFGLAGLPGSPKKRVRIECKCGTESCRKYL
FEF
>hs_RCOR1
(SEQ ID NO: 205)
ASSPKKKRKVEASSNSWEEGSSGSSSDEEHGGGGMRVGPQYQAVVPDFDPA
KLARRSQERDNLGMLVWSPNQNLSEAKLDEYIAIAKEKHGYNMEQALGMLFWHKHNI
EKSLADLPNFTPFPDEWTVEDKVLFEQAFSFHGKTFHRIQQMLPDKSIASLVKFYYSWK
KTRTKTSVMDRHARKQKREREESEDELEEANGNNPIDIEVDQNKESKKEVPPTETVPQV
KKEKHSTEF
>hs_sin3a
(SEQ ID NO: 206)
ASSPKKKRKVEASYKESVHLETYPKERATEGIAMEIDYASCKRLGSSYRALP
KSYQQPKCTGRTPLCKEVLNDTWVSFPSWSEDSTFVSSKKTQYEEHIYRCEDERFELDV
VLETNLATIRVLEAIQKKLSRLSAEEQAKFRLDNTLGGTSEVIHRKALQRIYADKAADIID
GLRKNPSIAVPIVLKRLKMKEEEWREAQRGFNKVWREQNEKYYLKSLDHQGINFKQND
TKVLRSKSLLNEIESIYDERQEQATEENAGVPVGPHLSLAYEDKQILEDAAALIIHHVKR
QTGIQKEDKYKIKQIMHHFIPDLLFAQRGDLSDVEEEEEEEMDVDEATGAVEF
>at_SUVR4
(SEQ ID NO: 207)
ASSPKKKRKVEASQSAYLHVSLARISDEDCCANCKGNCLSADFPCTCARETS
GEYAYTKEGLLKEKFLDTCLKMKKEPDSFPKVYCKDCPLERDHDKGTYGKCDGHLIRK
FIKECWRKCGCDMQCGNRVVQRGIRCQLQVYFTQEGKGWGLRTLQDLPDGTFICEYIG
EILTNTELYDRNVRSSSERHTYPVTLDADWGSEKDLKDEEALCLDATICGNVARFINHR
CEDANMIDIPIEIETPDRHYYHIAFFTLRDVKAMDELTWDYMIDFNDKSHPVKAFRCCC
GSESCRDRKIKGSQGKSIERRKIVSAKKQQGSKEVSKKRKEF
>rn_MeCP2_NLS
(SEQ ID NO: 208)
ASSPKKKRKVEASVQVKRVLEKSPGKLLVKMPFQASPGGKGEGGGATTSAQ
VMVIKRPGRKRKAEADPQAIPKKRGRKPGSVVAAAAAEAKKKAVKESSIRSVQETVLPI
KKRKTRETVSIEVKEVVKPLLVSTLGEKSGKGLKTCKSPGRKSKESSPKGRSSSASSPPK
KEHHHHHHHAESPKAPMPLLPPPPPPEPQSSEDPISPPEPQDLSSSICKEEKMPRAGSLESD
GCPKEPAKTQPMVAAAATTTTTTTTTVAEKYKHRGEGERKDIVSSSMPRPNREEPVDSR
TPVTERVSEF
>mm_SET-TAF1B
(SEQ ID NO: 209)
ASSPKKKRKVEASMAPKRQSAILPQPKKPRPAAAPKLEDKSADPGLPKGEKE
QQEAIEHIDEVQNEIDRLNEQASEEILKVEQKYNKLRQPFFQKRSELIAKIPNFWVTTFVN
HPQVSALLGEEDEEALHYLTRVEVTEFEDIKSGYRIDFYFDENPYFENKVLSKEFHLNES
GDPSSKSTEIKWKSGKDLTKRSSQTQNKASRKRQHEEPESFFTWFTDHSDAGADELGEV
IKDDIWPNPLQYYLVPDMDDEEGEAEDDDDDDEEEEGLEDIDEEGDEDEGEEDDDEDE
GEEGEEDEGEDDEF
>ce_Set4
(SEQ ID NO: 210)
ASSPKKKRKVEASMQLHEQIANISVTFNDIPRSDHSMTPTELCYFDDFATTLV
VDSVLNFTTHKMSKKRRYLYQDEYRTARTVMKTFREQRDWTNAIYGLLTLRSVSHFLS
KLPPNKLFEFRDHIVRFLNMFILDSGYTIQECKRYSQEGHQGAKLVSTGVWSRGDKIERL
SGVVCLLSSEDEDSILAQEGSDFSVMYSTRKRCSTLWLGPGAYINHDCRPTCEFVSHGST
AHIRVLRDMVPGDEITCFYGSEFFGPNNIDCECCTCEKNMNGAFSYLRGNENAEPIISEK
KYKYELRSRSEF

[0537] Photostimulation Hardware Control Scripts

[0538] The following Arduino script was used to enable the individual control of each 4-well column of a light-stimulated 24-well plate

```
//Basic control code for LITE LED array using Arduino UNO
//LED column address initialization to PWM-ready Arduino outputs
int led1_Pin = 3;
int led2_Pin = 5;
int led3_Pin = 6;
int led4_Pin = 9;
int led5_Pin = 10;
int led6_Pin = 11;
//Maximum setting for Arduino PWM
int uniform_brightness = 255;
//PWM settings for individual LED columns
int led1_brightness = uniform_brightness/2;
int led2_brightness = uniform_brightness/2;
int led3_brightness = uniform_brightness/2;
int led4_brightness = uniform_brightness/2;
int led5_brightness = uniform_brightness/2;
int led6_brightness = uniform_brightness/2;
//‘on’ time in msec
unsigned long uniform_stim_time = 1000; /
//individual ‘on’ time settings for LED columns
unsigned long led1_stim_time = uniform_stim_time;
unsigned long led2_stim_time = uniform_stim_time;
unsigned long led3_stim_time = uniform_stim_time;
unsigned long led4_stim_time = uniform_stim_time;
unsigned long led5_stim_time = uniform_stim_time;
unsigned long led6_stim_time = uniform_stim_time;
//‘off’ time in msec
unsigned long uniform_off_time = 14000;
//individual ‘off’ time settingsfor LED columns
unsigned long led1_off_time = uniform_off_time;
unsigned long led2_off_time = uniform_off_time;
unsigned long led3_off_time = uniform_off_time;
unsigned long led4_off_time = uniform_off_time;
unsigned long led5_off_time = uniform_off_time;
unsigned long led6_off_time = uniform_off_time;
unsigned long currentMillis = 0;
//initialize timing and state variables
unsigned long led1_last_change = 0;
unsigned long led2_last_change = 0;
unsigned long led3_last_change = 0;
unsigned long led4_last_change = 0;
unsigned long led5_last_change = 0;
unsigned long led6_last_change = 0;
int led1_state = HIGH;
int led2_state = HIGH;
int led3_state = HIGH;
int led4_state = HIGH;
int led5_state = HIGH;
int led6_state = HIGH;
unsigned long led1_timer = 0;
unsigned long led2_timer = 0;
unsigned long led3_timer = 0;
unsigned long led4_timer = 0;
unsigned long led5_timer = 0;
unsigned long led6_timer = 0;
void setup() [
  // setup PWM pins for output
  pinMode(led1_pin, OUTPUT) ;
  pinMode(led2_pin, OUTPUT) ;
  pinMode(led3_pin, OUTPUT) ;
  pinMode(led4_pin, OUTPUT) ;
  pinMode(led5_pin, OUTPUT) ;
  pinMode(led6_pin, OUTPUT) ;
  //LED starting state
  analogWrite(led1_pin, led1_brightness) ;
  analogWrite(led2_pin, led2_brightness) ;
  analogWrite(led3_pin, led3_brightness) ;
  analogWrite(led4_pin, led4_brightness) ;
  analogWrite(led5_pin, led5_brightness) ;
  analogWrite(led6_pin, led6_brightness) ;
]
void loop() [
  currentMillis = millis() ;
  //identical timing loops for the 6 PWM output pins
  led1_timer = currentMillis - led1_last_change;
  if (led1_state == HIGH) [ //led state is on
    if (led1_timer >= led1_stim_time) [ //TRUE if stim time is complete
      analogWrite(led1_pin, 0) ; //turn LED off
      led1_state = LOW; //change LED state variable
      led1_last_change = currentMillis; //mark time of most recent change
    ]
  ]
  else [ //led1 state is off
    if (led1_timer >= led1_off_time) [ //TRUE if off time is complete
```

| | |
|---|---|
| analogWrite(led1_pin, led1_brightness) ; | //turn LED on |
| led1_state = HIGH; | //change LED state variable |
| led1_last_change = currentMillis; | //mark time of most recent change |

```
    ]
  ]
  led2_timer = currentMillis - led2_last_change;
  if (led2_state == HIGH) [
    if (led2_timer >= led2_stim_time) [
      analogWrite(led2_pin, 0) ;
      led2_state = LOW;
      led2_last_change = currentMillis;
    ]
  ]
  else [ //led2 state is off
    if (led2_timer >= led2_off_time) [
      analogWrite(led2_pin, led2_brightness) ;
      led2_state = HIGH;
      led2_last_change = currentMillis;
    ]
  ]
  led3_timer = currentMillis - led3_last_change;
  if (led3_state == HIGH) [
    if (led3_timer >= led3_stim_time) [
      analogWrite(led3_pin, 0) ;
      led3_state = LOW;
      led3_last_change = currentMillis;
    ]
  ]
  else [ //led3 state is off
    if (led3_timer >= led3_off_time) [
      analogWrite(led3_pin, led3_brightness) ;
      led3_state = HIGH;
      led3_last_change = currentMillis;
    ]
  ]
  led4_timer = currentMillis - led4_last_change;
  if (led4_state == HIGH) [
    if (led4_timer >= led4_stim_time) [
      analogWrite(led4_pin, 0) ;
      led4_state = LOW;
      led4_last_change = currentMillis;
    ]
  ]
  else [ //led4 state is off
    if (led4_timer >= led4_off_time) [
      analogWrite(led4_pin, led4_brightness) ;
      led4_state = HIGH;
      led4_last_change = currentMillis;
    ]
  ]
  led5_timer = currentMillis - led5_last_change;
  if (led5_state == HIGH) [
    if (led5_timer >= led5_stim_time) [
      analogWrite(led5_pin, 0) ;
      led5_state = LOW;
      led5_last_change = currentMillis;
    ]
  ]
  else [ //led5 state is off
    if (led5_timer >= led5_off_time) [
      analogWrite(led5_pin, led5_brightness) ;
      led5_state = HIGH;
      led5_last_change = currentMillis;
    ]
  ]
  led6_timer = currentMillis - led6_last_change;
  if (led6_state == HIGH) [
    if (led6_timer >= led6_stim_time) [
      analogWrite(led6_pin, 0) ;
      led6_state = LOW;
      led6_last_change = currentMillis;
    ]
  ]
  else [ //led6 state is off
    if (led6_timer >= led6_off_time) [
      analogWrite(led6_pin, led6_brightness) ;
      led6_state = HIGH;
      led6_last_change = currentMillis;
    ]
  ]
]
```

### Example 12

### Optical Control of Endogenous Mammalian Transcription

[0539] To test the efficacy of AAV-mediated TALE delivery for modulating transcription in primary mouse cortical neurons, Applicants constructed six TALE-DNA binding domains targeting the genetic loci of three mouse neurotransmitter receptors: Grm5, Grm2a, and Grm2, which encode mGluR5, NMDA subunit 2A and mGluR2, respectively (FIG. 58). To increase the likelihood of a target site accessibility, Applicants used mouse cortex DNase I sensitivity data from the UCSC genome browser to identify putative open chromatin regions. DNase I sensitive regions in the promoter of each target gene provided a guide for the selection of TALE binding sequences (FIG. 46). For each TALE, Applicants employed VP64 as a transcriptional activator or a quadruple tandem repeat of the mSin3 interaction domain (SID) (Beerli, R. R., Segal, D. J., Dreier, B. & Barbas, C. F., 3rd Toward controlling gene expression at will: specific regulation of the erbB-2/HER-2 promoter by using polydactyl zinc finger proteins constructed from modular building blocks. Proc Natl Acad Sci USA 95, 14628-14633 (1998) and Ayer, D. E., Laherty, C. D., Lawrence, Q. A., Armstrong, A. P. & Eisenman, R. N. Mad proteins contain a dominant transcription repression domain. Molecular and Cellular Biology 16, 5772-5781 (1996)) as a repressor. Applicants have previously shown that a single SID fused to TALE downregulated a target gene effectively in 293FT cells (Cong, L., Zhou, R., Kuo, Y.-c., Cunniff, M. & Zhang, F. Comprehensive interrogation of natural TALE DNA-binding modules and transcriptional repressor domains. Nat Commun 3, 968 (2012)). Hoping to further improve this TALE repressor, Applicants reasoned that four repeats of SID—analogous to the successful quadruple VP16 repeat architecture of VP64 (Beerli, R. R., Segal. D. J., Dreier. B. & Barbas, C. F., 3rd Toward controlling gene expression at will: specific regulation of the erbB-2/HER-2 promoter by using polydactyl zinc finger proteins constructed from modular building blocks. Proc Natl Acad Sci USA 95, 14628-14633 (1998)—might augment its repressive activity. This was indeed the case, as TALE-SID4X constructs enhanced repression ˜2-fold over TALE-SID in 293FT cells (FIG. 54).

[0540] Applicants found that four out of six TALE-VP64 constructs (T1, T2, T5 and T6) efficiently activated their target genes Grm5 and Grm2 in AAV-transduced primary neurons by up to 3- and 8-fold, respectively (FIG. 58). Similarly, four out of six TALE-SID4X repressors (T9, T10, T11, T12) reduced the expression of their endogenous targets Grm2a and Grm2 by up to 2- and 8-fold, respectively (FIG. 58). Together, these results indicate that constitutive TALEs can positively or negatively modulate endogenous target gene expression in neurons. Notably, efficient activation or repression by a given TALE did not predict its efficiency at transcriptional modulation in the opposite direction. Therefore, multiple TALEs may need to be screened to identify the most effective TALE for a particular locus.

[0541] For a neuronal application of LITEs, Applicants selected the Grm2 TALE (T6), which exhibited the strongest level of target upregulation in primary neurons, based on Applicants' comparison of 6 constitutive TALE activators (FIG. 58). Applicants investigated its function using 2 light pulsing frequencies with the same duty cycle of 0.8%. Both stimulation conditions achieved a ˜7-fold light-dependent increase in Grm2 mRNA levels (FIG. 38C). Further study confirmed that, significant target gene expression increases could be attained quickly (4-fold upregulation within 4 h; FIG. 38D). In addition, Applicants observed significant upregulation of mGluR2 protein after stimulation, demonstrating that changes effected by LITEs at the mRNA level are translated to the protein domain (FIG. 38E). Taken together, these results confirm that LITEs enable temporally precise optical control of endogenous gene expression in neurons.

[0542] As a compliment to Applicants' previously implemented LITE activators, Applicants next engineered a LITE repressor based on the TALE-SID4X constructs. Constitutive Grm2 TALEs (T11 and T12, FIG. 59A) mediated the highest level of transcription repression, and were chosen as LITE repressors (FIG. 59A, B). Both light-induced repressors mediated significant downregulation of Grm2 expression, with 1.95-fold and 1.75-fold reductions for TI 1 and T12, respectively, demonstrating the feasibility of optically controlled repression in neurons (FIG. 38G).

[0543] In order to deliver LITEs into neurons using AAV, Applicants had to ensure that the total viral genome size, with the LITE transgenes included, did not exceed 4.8 kb (Wu, Z., Yang, H. & Colosi, P. Effect of Genome Size on AAV Vector Packaging. Mol Ther 18, 80-86 (2009) and Dong J Y, F. P., Frizzell R A Quantitative analysis of the packaging capacity of recombinant adeno-associated virus. Human Gene Therapy 7, 2101-2112 (1996)). To that end, Applicants shortened the TALE N- and C-termini (keeping 136 aa in the N-terminus and 63 aa in the C-terminus) and exchanged the CRY2PHR and CIB1 domains (TALE-CIB1 and CRY2PHR-VP64; FIG. 38A). This switch allowed each component of LITE to fit into AAV vectors and did not reduce the efficacy of light-mediated transcription modulation (FIG. 60). These LITEs can be efficiently delivered into primary cortical neurons via co-transduction by a combination of two AAV vectors (FIG. 38B; delivery efficiencies of 83-92% for individual components with >80% co-transduction efficiency).

### Example 13

### Inducible Lentiviral Cas9

[0544] Lentivirus preparation. After cloning pCasES10 (which contains a lentiviral transfer plasmid backbone). HEK293FT at low passage (p=5) were seeded in a T-75 flask to 50% confluence the day before transfection in DMEM with 10% fetal bovine serum and without antibiotics. After 20 hours, media was changed to OptiMEM (serum-free) media and transfection was done 4 hours later. Cells were transfected with 10 ug of lentiviral transfer plasmid (pCasES10) and the following packaging plasmids: 5 ug of pMD2.G (VSV-g pseudotype), and 7.5 ug of psPAX2 (gag/pol/rev/tat). Transfection was done in 4 mL OptiMEM with a cationic lipid delivery agent (50 uL Lipofectamine 2000 and 100 ul Plus reagent). After 6 hours, the media was changed to antibiotic-free DMEM with 10% fetal bovine serum.

[0545] Lentivirus purification. Viral supernatants were harvested after 48 hours. Supernatants were first cleared of debris and filtered through a 0.45 um low protein binding (PVDF) filter. They were then spun in a ultracentrifuge for 2 hours at 24,000 rpm. Viral pellets were resuspended in 50 ul of DMEM overnight at 4 C. They were then aliquotted and immediately frozen at −80 C.

[0546] Clonal isolation using FACS. For clonal isolation of HEK293FT and HUES64 human embryonic stem cells, cells were infected in suspension with either 1 ul or 5 ul of purified virus. Twenty-four hours post infection, 1 uM doxycycline was added to the cell culture media. After 24 or 48 hours more, cells underwent fluorescence-assisted cell sorting (FACS) on a BD FACSAria IIu instrument to isolate single cells that robustly expressed EGFP (and hence Cas9) after doxycycline treatment. Cell were plated either in bulk or into individual wells to allow selection of clonal populations with an integrated inducible Cas9 for further use. Sort efficiency was always >95% and cells were visualized immediately after plating to verify EGFP fluorescence.

[0547] FIG. 61 depicts Tet Cas9 vector designs

[0548] FIG. 62 depicts a vector and EGFP expression in 293FT cells.

Sequence of pCasES020 inducible Cas9:

(SEQ ID NO: 211)

caactttgtatagaaaagttggctccgaattcgcccttcaggtccgaggt
tctagacgagtttactccctatcagtgatagagaacgatgtcgagtttac
tccctatcagtgatagagaacgtatgtcgagtttactccctatcagtgat
agagaacgtatgtcgagtttactccctatcagtgatagagaacgtatgtc
gagtttatccctatcagtgatagagaacgtatgtcgagtttactccctat
cagtgatagagaacgtatgtcgaggtaggcgtgtacggtgggaggcctat
ataagcagagctcgtttagtgaaccgtcagatcgcaaagggcgaattcga
cccaagtttgtacagccaccATGGACTATAAGGACCACGACGGAGACTAC
AAGGATCATGATATTGATTACAAAGACGATGACGATAAGATGGCCCCAAA
GAAGAAGCGGAAGGTCGGTATCCACGGAGTCCCAGCAGCCGACAAGAAGT
ACAGCATCGGCCTGGACATCGGCACCAACTCTGTGGGCTGGGCCGTGATC
ACCGACGAGTACAAGGTGCCCAGCAAGAAATTCAAGGTGCTGGGCAACAC
CGACCGGCACAGCATCAAGAAGAACCTGATCGGAGCCCTGCTGTTCGACA
GCGGCGAAACAGCCGAGGCCACCCGGCTGAAGAGAACCGCCAGAAGAAGA
TACACCAGACGGAAGAACCGGATCTGCTATCTGCAAGAGATCTTCAGCAA
CGAGATGGCCAAGGTGGACGACAGCTTCTTCCACAGACTGGAAGAGTCCT
TCCTGGTGGAAGAGGATAAGAAGCACGAGCGGCACCCCATCTTCGGCAAC
ATCGTGGACGAGGTGGCCTACCACGAGAAGTACCCCACCATCTACCACCT
GAGAAAGAAACTGGTGGACAGCACCGACAAGGCCGACCTGCGGCTGATCT
ATCTGGCCCTGGCCCACATGATCAAGTTCCGGGGCCACTTCCTGATCGAG
GGCGACCTGAACCCCGACAACAGCGACGTGGACAAGCTGTTCATCCAGCT
GGTGCAGACCTACAACCAGCTGTTCGAGGAAAACCCCATCAACGCCAGCG
GCGTGGACGCCAAGGCCATCCTGTCTGCCAGACTGAGCAAGAGCAGACGG
CTGGAAAATCTGATCGCCCAGCTGCCCGGCGAGAAGAAGAATGGCCTGTT
CGGCAACCTGATTGCCCTGAGCCTGGGCCTGACCCCCAACTTCAAGAGCA
ACTTCGACCTGGCCGAGGATGCCAAACTGCAGCTGAGCAAGGACACCTAC
GACGACGACCTGGACAACCTGCTGGCCCAGATCGGCGACCAGTACGCCGA
CCTGTTTCTGGCCGCCAAGAACCTGTCCGACGCCATCCTGCTGAGCGACA
TCCTGAGAGTGAACACCGAGATCACCAAGGCCCCCCTGAGCGCCTCTATG
ATCAAGAGATACGACGAGCACCACCAGGACCTGACCCTGCTGAAAGCTCT
CGTGCGGCAGCAGCTGCCTGAGAAGTACAAAGAGATTTTCTTCGACCAGA
GCAAGAACGGCTACGCCGGCTACATTGACGGCGGAGCCAGCCAGGAAGAG
TTCTACAAGTTCATCAAGCCCATCCTGGAAAAGATGGACGGCACCGAGGA
ACTGCTCGTGAAGCTGAACAGAGAGGACCTGCTGCGGAAGCAGCGGACCT
TCGACAACGGCAGCATCCCCCACCAGATCCACCTGGGAGAGCTGCACGCC
ATTCTGCGGCGGCAGGAAGATTTTTACCCATTCCTGAAGGACAACCGGGA
AAAGATCGAGAAGATCCTGACCTTCCGCATCCCCTACTACGTGGGCCCTC
TGGCCAGGGGAAACAGCAGATTCGCCTGGATGACCAGAAAGAGCGAGGAA
ACCATCACCCCCTGGAACTTCGAGGAAGTGGTGGACAAGGGCGCTTCCGC
CCAGAGCTTCATCGAGCGGATGACCAACTTCGATAAGAACCTGCCCAACG
AGAAGGTGCTGCCCAAGCACAGCCTGCTGTACGAGTACTTCACCGTGTAT
AACGAGCTGACCAAAGTGAAATACGTGACCGAGGGAATGAGAAAGCCCGC
CTTCCTGAGCGGCGAGCAGAAAAAGGCCATCGTGGACCTGCTGTTCAAGA
CCAACCGGAAAGTGACCGTGAAGCAGCTGAAAGAGGACTACTTCAAGAAA
ATCGAGTGCTTCGACTCCGTGGAAATCTCCGGCGTGGAAGATCGGTTCAA
CGCCTCCCTGGGCACATACCACGATCTGCTGAAAATTATCAAGGACAAGG
ACTTCCTGGACAATGAGGAAAACGAGGACATTCTGGAAGATATCGTGCTG
ACCCTGACACTGTTTGAGGACAGAGAGATGATCGAGGAACGGCTGAAAAC
CTATGCCCACCTGTTCGACGACAAAGTGATGAAGCAGCTGAAGCGGCGGA
GATACACCGGCTGGGGCAGGCTGAGCCGGAAGCTGATCAACGGCATCCGG
GACAAGCAGTCCGGCAAGACAATCCTGGATTTCCTGAAGTCCGACGGCTT
CGCCAACAGAAACTTCATGCAGCTGATCCACGACGACAGCCTGACCTTTA
AAGAGGACATCCAGAAAGCCCAGGTGTCCGGCCAGGGCGATAGCCTGCAC
GAGCACATTGCCAATCTGGCCGGCAGCCCCGCCATTAAGAAGGGCATCCT
GCAGACAGTGAAGGTGGTGGACGAGCTCGTGAAAGTGATGGGCCGGCACA
AGCCCGAGAACATCGTGATCGAAATGGCCAGAGAGAACCAGACCACCCAG
AAGGGACAGAAGAACAGCCGCGAGAGAATGAAGCGGATCGAAGAGGGCAT
CAAAGAGCTGGGCAGCCAGATCCTGAAAGAACACCCCGTGGAAAACACCC
AGCTGCAGAACGAGAAGCTGTACCTGTACTACCTGCAGAATGGGCGGGAT
ATGTACGTGGACCAGGAACTGGACATCAACCGGCTGTCCGACTACGATGT
GGACCATATCGTGCCTCAGAGCTTTCTGAAGGACGACTCCATCGACAACA
AGGTGCTGACCAGAAGCGACAAGAACCGGGGCAAGAGCGACAACGTGCCC
TCCGAAGAGGTCGTGAAGAAGATGAAGAACTACTGGCGGCAGCTGCTGAA
CGCCAAGCTGATTACCCAGAGAAAGTTCGACAATCTGACCAAGGCCGAGA
GAGGCGGCCTGAGCGAACTGGATAAGGCCGGCTTCATCAAGAGACAGCTG
GTGGAAACCCGGCAGATCACAAAGCACGTGGCACAGATCCTGGACTCCCG
GATGAACACTAAGTACGACGAGAATGACAAGCTGATCCGGGAAGTGAAAG
TGATCACCCTGAAGTCCAAGCTGGTGTCCGATTTCCGGAAGGATTTCCAG
TTTTACAAAGTGCGCGAGATCAACAACTACCACCACGCCCACGACGCCTA
CCTGAACGCCGTCGTGGGAACCGCCCTGATCAAAAAGTACCCTAAGCTGG
AAAGCGAGTTCGTGTACGGCGACTACAAGGTGTACGACGTGCGGAAGATG
ATCGCCAAGAGCGAGCAGGAAATCGGCAAGGCTACCGCCAAGTACTTCTT
CTACAGCAACATCATGAACTTTTTCAAGACCGAGATTACCCTGGCCAACG
GCGAGATCCGGAAGCGGCCTCTGATCGAGACAAACGGCGAAACCGGGGAG
ATCGTGTGGGATAAGGGCCGGGATTTTGCCACCGTGCGGAAAGTGCTGAG
CATGCCCCAAGTGAATATCGTGAAAAAGACCGAGGTGCAGACAGGCGGCT
TCAGCAAAGAGTCTATCCTGCCCAAGAGGAACAGCGATAAGCTGATCGCC
AGAAAGAAGGACTGGGACCCTAAGAAGTACGGCGGCTTCGACAGCCCCAC
CGTGGCCTATTCTGTGCTGGTGGTGGCCAAAGTGGAAAAGGGCAAGTCCA
AGAAACTGAAGAGTGTGAAAGAGCTGCTGGGGATCACCATCATGGAAAGA
AGCAGCTTCGAGAAGAATCCCATCGACTTTCTGGAAGCCAAGGGCTACAA
AGAAGTGAAAAAGGACCTGATCATCAAGCTGCCTAAGTACTCCCTGTTCG
AGCTGGAAAACGGCCGGAAGAGAATGCTGGCCTCTGCCGGCGAACTGCAG
AAGGGAAACGAACTGGCCCTGCCCTCCAAATATGTGAACTTCCTGTACCT
GGCCAGCCACTATGAGAAGCTGAAGGGCTCCCCCGAGGATAATGAGCAGA
AACAGCTGTTTGTGGAACAGCACAAGCACTACCTGGACGAGATCATCGAG
CAGATCAGCGAGTTCTCCAAGAGAGTGATCCTGGCCGACGCTAATCTGGA
CAAAGTGCTGTCCGCCTACAACAAGCACCGGGATAAGCCCATCAGAGAGC
AGGCCGAGAATATCATCCACCTGTTTACCCTGACCAATCTGGGAGCCCCT
GCCGCCTTCAAGTACTTTGACACCACCATCGACCGGAAGAGGTACACCAG
CACCAAAGAGGTGCTGGACGCCACCCTGATCCACCAGAGCATCACCGGCC
TGTACGAGACACGGATCGACCTGTCTCAGCTGGGAGGCGACAAAAGGCCG
GCGGCCACGAAAAAGGCCGGCCAGGCAAAAAAGAAAAAGgaattctctag
aGGCAGTGGAGAGGGCAGAGGAAGTCTGCTAACATGCGGTGACGTCGAGG
AGAATCCTGGCCCAGTGAGCAAGGGCGAGGAGCTGTTCACCGGGGTGGTG
CCCATCCTGGTCGAGCTGGACGGCGACGTAAACGGCCACAAGTTCAGCGT
GTCCGGCGAGGGCGAGGGCGATGCCACCTACGGCAAGCTGACCCTGAAGT
TCATCTGCACCACCGGCAAGCTGCCCGTGCCCTGGCCCACCCTCGTGACC
ACCCTGACCTACGGCGTGCAGTGCTTCAGCCGCTACCCCGACCACATGAA
GCAGCACGACTTCTTCAAGTCCGCCATGCCCGAAGGCTACGTCCAGGAGC
GCACCATCTTCTTCAAGGACGACGGCAACTACAAGACCCGCGCCGAGGTG
AAGTTCGAGGGCGACACCCTGGTGAACCGCATCGAGCTGAAGGGCATCGA
CTTCAAGGAGGACGGCAACATCCTGGGGCACAAGCTGGAGTACAACTACA
ACAGCCACAACGTCTATATCATGGCCGACAAGCAGAAGAACGGCATCAAG
GTGAACTTCAAGATCCGCCACAACATCGAGGACGGCAGCGTGCAGCTCGC
CGACCACTACCAGCAGAACACCCCCATCGGCGACGGCCCCGTGCTGCTGC
CCGACAACCACTACCTGAGCACCCAGTCCGCCCTGAGCAAAGACCCCAAC
GAGAAGCGCGATCACATGGTCCTGCTGGAGTTCGTGACCGCCGCCGGGAT
CACTCTCGGCATGGACGAGCTGTACAAGCTCGAGGGAAGCGGAGCTACTA
ACTTCAGCCTGCTGAAGCAGGCTGGCGACGTGGAGGAGAACCCTGGACCT
atgtctaggctggacaagagcaaagtcataaacggagctctggaattact
caatggtgtcggtatcgaaggcctgacgacaaggaaactcgctcaaaagc
tgggagttgagcagcctaccctgtactggcacgtgaagaacaagcgggcc
ctgctcgatgccctgccaatcgagatgctggacaggcatcatacccactt
ctgccccctggaaggcgagtcatggcaagactttctgcggaacaacgcca
agtcataccgctgtgctctcctctcacatcgcgacggggctaaagtgcat
ctcggcacccgcccaacagagaaacagtacgaaaccctggaaaatcagct
cgcgttcctgtgtcagcaaggcttctccctggagaacgcactgtacgctc
tgtccgccgtgggccactttacactgggctgcgtattggaggaacaggag
catcaagtagcaaaagaggaaagagagacacctaccaccgattctatgcc
cccacttctgagacaagcaattgagctgttcgaccggcagggagccgaac
ctgccttccttttcggcctggaactaatcatatgtggcctggagaaacag
ctaaagtgcgaaagcggcgggccgaccgacgcccttgacgattttgactt
agacatgctcccagccgatgcccttgacgattttgaccttgacatgctcc
ccgggtaatgtacaaagtggtgaattccggcaattcgatatcaagcttat
cgataatcaacctctggattacaaaatttgtgaaagattgactggtattc
ttaactatgttgctccttttacgctatgtggatacgctgctttaatgcct
ttgtatcatgctattgcttcccgtatggctttcattttctcctccttgta
taaatcctggttgctgtctctttatgaggagttgtggcccgttgtcaggc
aacgtggcgtggtgtgcactgtgtttgctgacgcaacccccactggttgg
ggcattgccaccacctgtcagctcctttccgggactttcgctttccccct
ccctattgccacggcggaactcatcgccgcctgccttgcccgctgctgga
caggggctcggctgttgggcactgacaattccgtggtgttgtcggggaaa
tcatcgtcctttccttggctgctcgcctgtgttgccacctggattctgcg
cgggacgtccttctgctacgtcccttcggccctcaatccagcggaccttc
cttcccgcggcctgctgccggctctgcggcctcttccgcgtcttcgcctt
cgccctcagacgagtcggatctccctttgggccgcctccccgcatcgata
ccgtcgacctcgagacctagaaaaacatggagcaatcacaagtagcaata
cagcagctaccaatgctgattgtgcctggctagaagcacaagaggaggag
gaggtgggttttccagtcacacctcaggtacctttaagaccaatgactta
caaggcagctgtagatcttagccactttttaaaagaaaaggggggactgg
aagggctaattcactcccaacgaagacaagatatccttgatctgtggatc
taccacacacaaggctacttccctgattggcagaactacacaccagggcc
agggatcagatatccactgacctttggatggtgctacaagctagtaccag
ttgagcaagagaaggtagaagaagccaatgaaggagagaacacccgcttg
ttacaccctgtgagcctgcatgggatggatgacccggagagagaagtatt
agagtggaggtttgacagccgcctagcatttcatcacatggcccgagagc
tgcatccggactgtactgggtctctctggttagaccagatctgagcctgg
gagctctctggctaactagggaacccactgcttaagcctcaataaagctt
gccttgagtgcttcaagtagtgtgtgcccgtctgttgtgtgactctggta
actagagatccctcagacccttttagtcagtgtggaaaatctctagcagg
gcccgtttaaacccgctgatcagcctcgactgtgccttctagttgccagc
catctgttgtttgcccctcccccgtgccttccttgaccctggaaggtgcc
actcccactgtcctttcctaataaaatgaggaaattgcatcgcattgtct
gagtaggtgtcattctattctggggggtggggtggggcaggacagcaagg
gggaggattgggaagacaatagcaggcatgctggggatgcggtgggctct
atggcttctgaggcggaaagaaccagctggggctctagggggtatcccca
cgcgccctgtagcggcgcattaagcgcggcgggtgtggtggttacgcgca
gcgtgaccgctacacttgccagcgccctagcgcccgctcctttcgctttc
ttcccttcctttctcgccacgttcgccggctttccccgtcaagctctaaa
tcgggggctccctttagggttccgatttagtgctttacggcacctcgacc
ccaaaaaacttgattagggtgatggttcacgtagtgggccatcgccctga
tagacggtttttcgccctttgacgttggagtccacgttctttaatagtgg
actcttgttccaaactggaacaacactcaaccctatctcggtctattctt
ttgatttataagggattttgccgatttcggcctattggttaaaaaatgag
ctgatttaacaaaaatttaacgcgaattaattctgtggaatgtgtgtcag
ttagggtgtggaaagtccccaggctccccagcaggcagaagtatgcaaag
catgcatctcaattagtcagcaaccaggtgtggaaagtccccaggctccc
cagcaggcagaagtatgcaaagcatgcatctcaattagtcagcaaccata
gtcccgcccctaactccgcccatcccgcccctaactccgcccagttccgc
ccattctccgccccatggctgactaattttttttatttatgcagaggccg
aggccgcctctgcctctgagctattccagaagtagtgaggaggctttttt
ggaggcctaggcttttgcaaaaagctcccgggagcttgtatatccatttt
cggatctgatcagcacgtgttgacaattaatcatcggcatagtatatcgg
catagtataatacgacaaggtgaggaactaaaccatggccaagttgacca
gtgccgttccggtgctcaccgcgcgcgacgtcgccggagcggtcgagttc
tggaccgaccggctcgggttctcccgggacttcgtggaggacgacttcgc
cggtgtggtccgggacgacgtgaccctgttcatcagcgcggtccaggacc
aggtggtgccggacaacaccctggcctgggtgtgggtgcgcggcctggac
gagctgtacgccgagtggtcggaggtcgtgtccacgaacttccgggacgc
ctccgggccggccatgaccgagatcggcgagcagccgtgggggcgggagt
tcgccctgcgcgacccggccggcaactgcgtgcacttcgtggccgaggag
caggactgacacgtgctacgagatttcgattccaccgccgccttctatga
aaggttgggcttcggaatcgttttccgggacgccggctggatgatcctcc
agcgcggggatctcatgctggagttcttcgcccaccccaacttgtttatt
gcagcttataatggttacaaataaagcaatagcatcacaaatttcacaaa
taaagcatttttttcactgcattctagttgtggtttgtccaaactcatca
atgtatcttatcatgtctgtataccgtcgacctctagctagagcttggcg
taatcatggtcatagctgtttcctgtgtgaaattgttatccgctcacaat
tccacacaacatacgagccggaagcataaagtgtaaagcctggggtgcct
aatgagtgagctaactcacattaattgcgttgcgctcactgcccgctttc
cagtcgggaaacctgtcgtgccagctgcattaatgaatcggccaacgcgc
ggggagaggcggtttgcgtattgggcgctcttccgcttcctcgctcactg
actcgctgcgctcggtcgttcggctgcggcgagcggtatcagctcactca
aaggcggtaatacggttatccacagaatcaggggataacgcaggaaagaa
catgtgagcaaaaggccagcaaaaggccaggaaccgtaaaaaggccgcgt
tgctggcgtttttccataggctccgcccccctgacgagcatcacaaaaat
cgacgctcaagtcagaggtggcgaaacccgacaggactataaagatacca
ggcgtttccccctggaagctccctcgtgcgctctcctgttccgaccctgc
cgcttaccggatacctgtccgcctttctcccttcgggaagcgtggcgctt
tctcatagctcacgctgtaggtatctcagttcggtgtaggtcgttcgctc
caagctgggctgtgtgcacgaaccccccgttcagcccgaccgctgcgcct
tatccggtaactatcgtcttgagtccaacccggtaagacacgacttatcg
ccactggcagcagccactggtaacaggattagcagagcgaggtatgtagg
cggtgctacagagttcttgaagtggtggcctaactacggctacactagaa
gaacagtatttggtatctgcgctctgctgaagccagttaccttcggaaaa
agagttggtagctcttgatccggcaaacaaaccaccgctggtagcggtgg
tttttttgtttgcaagcagcagattacgcgcagaaaaaaaggatctcaag
aagatcctttgatcttttctacggggtctgacgctcagtggaacgaaaac
tcacgttaagggattttggtcatgagattatcaaaaaggatcttcaccta
gatccttttaaattaaaaatgaagttttaaatcaatctaaagtatatatg
agtaaacttggtctgacagttaccaatgcttaatcagtgaggcacctatc
tcagcgatctgtctatttcgttcatccatagttgcctgactccccgtcgt
gtagataactacgatacgggagggcttaccatctggccccagtgctgcaa
tgataccgcgagacccacgctcaccggctccagatttatcagcaataaac
cagccagccggaagggccgagcgcagaagtggtcctgcaactttatccgc
ctccatccagtctattaattgttgccgggaagctagagtaagtagttcgc
cagttaatagtttgcgcaacgttgttgccattgctacaggcatcgtggtg
tcacgctcgtcgtttggtatggcttcattcagctccggttcccaacgatc
aaggcgagttacatgatcccccatgttgtgcaaaaaagcggttagctcct
tcggtcctccgatcgttgtcagaagtaagttggccgcagtgttatcactc
atggttatggcagcactgcataattctcttactgtcatgccatccgtaag
atgcttttctgtgactggtgagtactcaaccaagtcattctgagaatagt
gtatgcggcgaccgagttgctcttgcccggcgtcaatacgggataatacc
gcgccacatagcagaactttaaaagtgctcatcattggaaaacgttcttc
ggggcgaaaactctcaaggatcttaccgctgttgagatccagttcgatgt
aacccactcgtgcacccaactgatcttcagcatcttttactttcaccagc
gtttctgggtgagcaaaaacaggaaggcaaaatgccgcaaaaaagggaat
aagggcgacacggaaatgttgaatactcatactcttcctttttcaatatt
attgaagcatttatcagggttattgtctcatgagcggatacatatttgaa
tgtatttagaaaaataaacaaataggggttccgcgcacatttccccgaaa
agtgccacctgacgtcgacggatcgggagatctcccgatcccctatggtg
cactctcagtacaatctgctctgatgccgcatagttaagccagtatctgc
tccctgcttgtgtgttggaggtcgctgagtagtgcgcgagcaaaatttaa
gctacaacaaggcaaggcttgaccgacaattgcatgaagaatctgcttag
ggttaggcgttttgcgctgcttcgcgatgtacgggccagatatacgcgtt
gacattgattattgactagttattaatagtaatcaattacggggtcatta
gttcatagcccatatatggagttccgcgttacataacttacggtaaatgg
cccgcctggctgaccgcccaacgacccccgcccattgacgtcaataatga
cgtatgttcccatagtaacgccaatagggactttccattgacgtcaatgg
gtggagtatttacggtaaactgcccacttggcagtacatcaagtgtatca
tatgccaagtacgccccctattgacgtcaatgacggtaaatggcccgcct
ggcattatgcccagtacatgaccttatgggactttcctacttggcagtac
atctacgtattagtcatcgctattaccatggtgatgcggttttggcagta
catcaatgggcgtggatagcggtttgactcacggggatttccaagtctcc
accccattgacgtcaatgggagtttgttttggcaccaaaatcaacgggac
tttccaaaatgtcgtaacaactccgccccattgacgcaaatgggcggtag
gcgtgtacggtgggaggtctatataagcagcgcgttttgcctgtactggg
tctctctggttagaccagatctgagcctgggagctctctggctaactagg
gaacccactgcttaagcctcaataaagcttgccttgagtgcttcaagtag
tgtgtgcccgtctgttgtgtgactctggtaactagagatccctcagaccc
ttttagtcagtgtggaaaatctctagcagtggcgcccgaacagggacttg
aaagcgaaagggaaaccagaggagctctctcgacgcaggactcggcttgc
tgaagcgcgcacggcaagaggcgaggggcggcgactggtgagtacgccaa
aaattttgactagcggaggctagaaggagagagatgggtgcgagagcgtc
agtattaagcgggggagaattagatcgcgatgggaaaaaattcggttaag
gccagggggaaagaaaaaatataaattaaaacatatagtatgggcaagca
gggagctagaacgattcgcagttaatcctggcctgttagaaacatcagaa
ggctgtagacaaatactgggacagctacaaccatcccttcagacaggatc
agaagaacttagatcattatataatacagtagcaaccctctattgtgtgc
atcaaaggatagagataaaagacaccaaggaagctttagacaagatagag
gaagagcaaaacaaaagtaagaccaccgcacagcaagcggccgctgatct
tcagacctggaggaggagatatgagggacaattggagaagtgaattatat
aaatataaagtagtaaaaattgaaccattaggagtagcacccaccaaggc
aaagagaagagtggtgcagagagaaaaaagagcagtgggaataggagctt
tgttccttgggttcttgggagcagcaggaagcactatgggcgcagcgtca
atgacgctgacggtacaggccagacaattattgtctggtatagtgcagca
gcagaacaatttgctgagggctattgaggcgcaacagcatctgttgcaac
tcacagtctggggcatcaagcagctccaggcaagaatcctggctgtggaa
agatacctaaaggatcaacagctcctggggatttggggttgctctggaaa
actcatttgcaccactgctgtgccttggaatgctagttggagtaataaat
ctctggaacagatttggaatcacacgacctggatggagtgggacagagaa
attaacaattacacaagcttaatacactccttaattgaagaatcgcaaaa
ccagcaagaaaagaatgaacaagaattattggaattagataaatgggcaa
gtttgtggaattggtttaacataacaaattggctgtggtatataaaatta
ttcataatgatagtaggaggcttggtaggtttaagaatagtttttgctgt
actttctatagtgaatagagttaggcagggatattcaccattatcgtttc
agacccacctcccaaccccgaggggacccgacaggcccgaaggaatagaa
gaagaaggtggagagagagacagagacagatccattcgattagtgaacgg
atcggcactgcgtgcgccaattctgcagacaaatggcagtattcatccac
aattttaaaagaaaaggggggattggggggtacagtgcaggggaaagaat
agtagacataatagcaacagacatacaaactaaagaattacaaaaacaaa
ttacaaaaattcaaaattttcgggtttattacagggacagcagagatcca
gtttggttaattaa

### Example 14

### CRISPR Complex Activity in the Nucleus of a Eukaryotic Cell

[0549] An example type II CRISPR system is the type II CRISPR locus from Streptococcus pyogenes SF370, which contains a cluster of four genes Cas9, Cas1, Cas2, and Csn 1, as well as two non-coding RNA elements, tracrRNA and a characteristic array of repetitive sequences (direct repeats) interspaced by short stretches of non-repetitive sequences (spacers, about 30 bp each). In this system, targeted DNA double-strand break (DSB) is generated in four sequential steps (FIG. 63A). First, two non-coding RNAs, the pre-crRNA array and tracrRNA, are transcribed from the CRISPR locus. Second, tracrRNA hybridizes to the direct repeats of pre-crRNA, which is then processed into mature crRNAs containing individual spacer sequences. Third, the mature crRNA:tracrRNA complex directs Cas9 to the DNA target consisting of the protospacer and the corresponding PAM via heteroduplex formation between the spacer region of the crRNA and the protospacer DNA. Finally, Cas9 mediates cleavage of target DNA upstream of PAM to create a DSB within the protospacer (FIG. 63A). This example describes an example process for adapting this RNA-programmable nuclease system to direct CRISPR complex activity in the nuclei of eukaryotic cells.

[0550] Cell Culture and Transfection

[0551] Human embryonic kidney (HEK) cell line HEK 293FT (Life Technologies) was maintained in Dulbecco's modified Eagle's Medium (DMEM) supplemented with 10% fetal bovine serum (HyClone), 2 mM GlutaMAX (Life Technologies), 100U/mL penicillin, and 100!lg/mL streptomycin at 3rC with 5% C02 incubation. Mouse neuro2A (N2A) cell line (ATCC) was maintained with DMEM supplemented with 5% fetal bovine serum (HyClone), 2 mM GlutaMAX (Life Technologies), 100U/mL penicillin, and 100 μg/mL streptomycin at 37° C., with 5% CO2.

[0552] HEK 293FT or N2A cells were seeded into 24-well plates (Corning) one day prior to transfection at a density of 200,000 cells per well. Cells were transfected using Lipofectamine 2000 (Life Technologies) following the manufacturer's recommended protocol. For each well of a 24-well plate a total of 800 ng of plasmids were used.

[0553] Surveyor Assay and Sequencing Analysis for Genome Modification

[0554] HEK 293FT or N2A cells were transfected with plasmid DNA as described above. After transfection, the cells were incubated at 37° C., for 72 hours before genomic DNA extraction. Genomic DNA was extracted using the QuickExtract DNA extraction kit (Epicentre) following the manufacturer's protocol. Briefly, cells were resuspended in QuickExtract solution and incubated at 65° C., for 15 minutes and 98° C., for 10 minutes. Extracted genomic DNA was immediately processed or stored at −20° C.

[0555] The genomic region surrounding a CRISPR target site for each gene was PCR amplified, and products were purified using QiaQuick Spin Column (Qiagen) following manufacturer's protocol. A total of 400 ng of the purified PCR products were mixed with 2 μl 10× Taq polymerase PCR buffer (Enzymatics) and ultrapure water to a final volume of 20 μl, and subjected to are-annealing process to enable heteroduplex formation: 95° C., for 10 min, 95° C., to 85° C., ramping at—2° C./s, 85° C., to 25° C., at—0.25° C./s, and 25° C., hold for 1 minute. After re-annealing, products were treated with Surveyor nuclease and Surveyor enhancer S (Transgenomics) following the manufacturer's recommended protocol, and analyzed on 4-20% Novex TBE poly-acrylamide gels (Life Technologies). Gels were stained with SYBR Gold DNA stain (Life Technologies) for 30 minutes and imaged with a Gel Doc gel imaging system (Bio-rad). Quantification was based on relative band intensities, as a measure of the fraction of cleaved DNA. FIG. 29 provides a schematic illustration of this Surveyor assay.

[0556] Restriction Fragment Length Polymorphism Assay for Detection of Homologous Recombination

[0557] HEK 293FT and N2A cells were transfected with plasmid DNA, and incubated at 37° C., for 72 hours before genomic DNA extraction as described above. The target genomic region was PCR amplified using primers outside the homology arms of the homologous recombination (HR) template. PCR products were separated on a 1% agarosc gel and extracted with MinElute GelExtraction Kit (Qiagen). Purified products were digested with HindIII (Fermentas) and analyzed on a 6% Novex TBE poly-acrylamide gel (Life Technologies).

[0558] RNVA Secondary Structure Prediction and Analysis

[0559] RNA secondary structure prediction was performed using the online webserver RNAfold developed at Institute for Theoretical Chemistry at the University of Vienna, using the centroid structure prediction algorithm (see e.g. A. R. Gruber et al., 2008, Cell 106(1): 23-24; and P A Can and G M Church, 2009, Nature Biotechnology 27(12): 1151-62).

[0560] Bacterial Plasmid Transformation Interference Assay

[0561] Elements of the S. pyogenes CRISPR locus 1 sufficient for CRISPR activity were reconstituted in E. coli using pCRISPR plasmid (schematically illustrated in FIG. 70A), pCRISPR contained tracrRNA, SpCas9, and a leader sequence driving the crRNA anay. Spacers (also referred to as “guide sequences”) were inserted into the crRNA anay between BsaI sites using annealed oligonucleotides, as illustrated. Challenge plasmids used in the interference assay were constructed by inserting the protospacer (also referred to as a “target sequence”) sequence along with an adjacent CRISPR motif sequence (PAM) into pUC19 (see FIG. 70B). The challenge plasmid contained ampicillin resistance. FIG. 70C provides a schematic representation of the interference assay. Chemically competent E. coli strains already carrying pCRISPR and the appropriate spacer were transformed with the challenge plasmid containing the corresponding protospacer-PAM sequence, pUC19 was used to assess the transformation efficiency of each pCRISPR-carrying competent strain. CRISPR activity resulted in cleavage of the pPSP plasmid carrying the protospacer, precluding ampicillin resistance otherwise conferred by pUC19 lacking the protospacer. FIG. 70D illustrates competence of each pCRISPR-carrying E. coli strain used in assays illustrated in FIG. 64C.

[0562] RNA Purification

[0563] HEK 293FT cells were maintained and transfected as stated above. Cells were harvested by trypsinization followed by washing in phosphate buffered saline (PBS). Total cell RNA was extracted with TRI reagent (Sigma) following manufacturer's protocol. Extracted total RNA was quantified using Naonodrop (Thermo Scientific) and normalized to same concentration.

[0564] Northern Blot Analysis of crRNA and tracrRNA Expression in Mammalian Cells

[0565] RNAs were mixed with equal volumes of 2× loading buffer (Ambion), heated to 95° C., for 5 min, chilled on ice for 1 min, and then loaded onto 8% denaturing polyacrylamide gels (SequaGel, National Diagnostics) after pre-running the gel for at least 30 minutes. The samples were electrophoresed for 1.5 hours at 40 W limit. Afterwards, the RNA was transferred to Hybond N+ membrane (GE Healthcare) at 300 rnA in a semi-dry transfer apparatus (Bio-rad) at room temperature for 1.5 hours. The RNA was crosslinked to the membrane using autocrosslink button on Stratagene UV Crosslinker the Stratalinker (Stratagene). The membrane was pre-hybridized in ULTRAhyb-Oligo Hybridization Buffer (Ambion) for 30 min with rotation at 42° C., and probes were then added and hybridized overnight. Probes were ordered from IDT and labeled with [gamma-³²P] ATP (Perkin Elmer) with T4 polynucleotide kinase (New England Biolabs). The membrane was washed once with pre-warmed (42° C.) 2×SSC, 0.5% SDS for 1 min followed by two 30 minute washes at 42° C. The membrane was exposed to a phosphor screen for one hour or overnight at room temperature and then scanned with a phosphorimager (Typhoon).

[0566] Bacterial CRISPR System Construction and Evaluation

[0567] CRISPR locus elements, including tracrRNA, Cas9, and leader were PCR amplified from Streptococcus pyogenes SF370 genomic DNA with flanking homology arms for Gibson Assembly. Two BsaI type IIS sites were introduced in between two direct repeats to facilitate easy insertion of spacers (FIG. 70). PCR products were cloned into EcoRV-digested pACYC184 downstream of the tet promoter using Gibson Assembly Master Mix (NEB). Other endogenous CRISPR system elements were omitted, with the exception of the last 50 bp of Csn2. Oligos (Integrated DNA Technology) encoding spacers with complimentary overhangs were cloned into the BsaI-digested vector pDC000 (NEB) and then ligated with T7 ligase (Enzymatics) to generate pCRISPR plasmids. Challenge plasmids containing spacers with PAM sequences (also referred to herein as “CRISPR motif sequences”) were created by ligating hybridized oligos carrying compatible overhangs (Integrated DNA Technology) into BamBI-digested pUC19. Cloning for all constructs was performed in E. coli strain JM109 (Zymo Research).

[0568] pCRISPR-carrying cells were made competent using the Z-Competent E. coli Transformation Kit and Buffer Set (Zymo Research, T3001) according to manufacturer's instructions. In the transformation assay, 50 uL aliquots of competent cells carrying pCRISPR were thawed on ice and transformed with 1 ng of spacer plasmid or pUC19 on ice for 30 minutes, followed by 45 second heat shock at 42° C., and 2 minutes on ice. Subsequently, 250 ul SOC (Invitrogen) was added followed by shaking incubation at 37° C. for 1 hr, and 100 uL of the post-SOC outgrowth was plated onto double selection plates (12.5 ug/ml chloramphenicol, 100 ug/ml ampicillin). To obtain cfu/ng of DNA, total colony numbers were multiplied by 3.

[0569] To improve expression of CRISPR components in mammalian cells, two genes from the SF370 locus 1 of Streptococcus pyogenes (S. pyogenes) were codon-optimized, Cas9 (SpCas9) and RNase III (SpRNase III). To facilitate nuclear localization, a nuclear localization signal (NLS) was included at the amino (N)- or carboxyl (C)-termini of both SpCas9 and SpRNase III (FIG. 63B). To facilitate visualization of protein expression, a fluorescent protein marker was also included at the N- or C-termini of both proteins (FIG. 63B). A version of SpCas9 with an NLS attached to both N- and C-termini (2×NLS-SpCas9) was also generated. Constructs containing NLS-fused SpCas9 and SpRNase III were transfected into 293FT human embryonic kidney (HEK) cells, and the relative positioning of the NLS to SpCas9 and SpRNase III was found to affect their nuclear localization efficiency. Whereas the C-terminal NLS was sufficient to target SpRNase III to the nucleus, attachment of a single copy of these particular NLS's to either the N- or C-terminus of SpCas9 was unable to achieve adequate nuclear localization in this system. In this example, the C-terminal NLS was that ofnucleoplasmin (KRPAATKKAGQAKKKK) (SEQ ID NO: 31), and the C-terminal NLS was that of the SV40 large T-antigen (PKKKRKV) (SEQ ID NO: 30). Of the versions of SpCas9 tested, only 2×NLS-SpCas9 exhibited nuclear localization (FIG. 63B).

[0570] The tracrRNA from the CRISPR locus of S. pyogenes SF370 has two transcriptional start sites, giving rise to two transcripts of 89-nucleotides (nt) and 171nt that are subsequently processed into identical 75nt mature tracrRNAs. The shorter 89nt tracrRNA was selected for expression in mammalian cells (expression constructs illustrated in FIG. 28A, with functionality as determined by results of Surveryor assay shown in FIG. 28B). Transcription start sites are marked as +1, and transcription terminator and the sequence probed by northern blot are also indicated. Expression of processed tracrRNA was also confirmed by Northern blot. FIG. 28C shows results of a Northern blot analysis of total RNA extracted from 293FT cells transfected with U6 expression constructs carrying long or short tracrRNA, as well as SpCas9 and DR-EMX1(1)-DR. Left and right panels are from 293FT cells transfected without or with SpRNase III, respectively. U6 indicate loading control blotted with a probe targeting human U6 snRNA. Transfection of the short tracrRNA expression construct led to abundant levels of the processed form oftracrRNA (˜75 bp). Very low amounts of long tracrRNA are detected on the Northern blot.

[0571] To promote precise transcriptional initiation, the RNA polymerase III-based U6 promoter was selected to drive the expression oftracrRNA (FIG. 63C). Similarly, a U6 promoter-based construct was developed to express a pre-crRNA anay consisting of a single spacer flanked by two direct repeats (DRs, also encompassed by the term “tracr-mate sequences”; FIG. 63C). The initial spacer was designed to target a 33-base-pair (bp) target site (30-bp protospacer plus a 3-bp CRISPR motif (PAM) sequence satisfying the NGG recognition motif ofCas9) in the human EMX1 locus (FIG. 63C), a key gene in the development of the cerebral cortex.

[0572] To test whether heterologous expression of the CRISPR system (SpCas9, SpRNase III, tracrRNA, and pre-crRNA) in mammalian cells can achieve targeted cleavage of mammalian chromosomes, HEK293FT cells were transfected with combinations of CRISPR components. Since DSBs in mammalian nuclei are partially repaired by the non-homologous end joining (NHEJ) pathway, which leads to the formation of indels, the Surveyor assay was used to detect potential cleavage activity at the target EML1 locus (FIG. 29) (see e.g. Guschin et al., 2010, Methods Mol Biol 649: 247). Co-transfection of all four CRISPR components was able to induce up to 5.0% cleavage in the protospacer (see FIG. 63D). Co-transfection of all CRISPR components minus SpRNase III also induced up to 4.7% indel in the protospacer, suggesting that there may be endogenous mammalian RNases that are capable of assisting with crRNA maturation, such as for example the related Dicer and Drosha enzymes. Removing any of the remaining three components abolished the genome cleavage activity of the CRISPR system (FIG. 63D). Sanger sequencing ofamplicons containing the target locus verified the cleavage activity: in 43 sequenced clones, 5 mutated alleles (11.6%) were found. Similar experiments using a variety of guide sequences produced indel percentages as high as 29% (see FIGS. 25, 26, 67 and 28). These results define a three-component system for efficient CRISPR-mediated genome modification in mammalian cells. To optimize the cleavage efficiency, we also tested whether different isoforms of tracrRNA affected the cleavage efficiency and found that, in this example system, only the short (89-bp) transcript form was able to mediate cleavage of the human EMX1 genomic locus (FIG. 28B).

[0573] FIG. 30 provides an additional Northern blot analysis of crRNA processing in mammalian cells. FIG. 30A illustrates a schematic showing the expression vector for a single spacer flanked by two direct repeats (DR-EMX1(1)-DR). The 30 bp spacer targeting the human EMX1 locus protospacer 1 (see FIG. 67) and the direct repeat sequences are shown in the sequence beneath FIG. 30A. The line indicates the region whose reverse-complement sequence was used to generate Northern blot probes for EMX1(1) crRNA detection. FIG. 30B shows a Northern blot analysis of total RNA extracted from 293FT cells transfected with U6 expression constructs canying DR-EMX1(1)-DR. Left and right panels are from 293FT cells transfected without or with SpRNase III respectively. DR-EMX1(1)-DR was processed into mature crRNAs only in the presence of SpCas9 and short tracrRNA and was not dependent on the presence of SpRNase III. The mature crRNA detected from transfected 293FT total RNA is −33 bp and is shorter than the 39-42 bp mature crRNA from S. pyogenes. These results demonstrate that a CRISPR system can be transplanted into eukaryotic cells and reprogrammed to facilitate cleavage of endogenous mammalian target polynucleotides.

[0574] FIG. 63 illustrates the bacterial CRISPR system described in this example. FIG. 63A illustrates a schematic showing the CRISPR locus 1 from Streptococcus pyogenes SF370 and a proposed mechanism of CRISPR-mediated DNA cleavage by this system. Mature crRNA processed from the direct repeat-spacer array directs Cas9 to genomic targets consisting of complimentary protospacers and a protospacer-adjacent motif (PAM). Upon target-spacer base pairing, Cas9 mediates a double-strand break in the target DNA. FIG. 63B illustrates engineering of S. pyogenes Cas9 (SpCas9) and RNase III (SpRNase III) with nuclear localization signals (NLSs) to enable import into the mammalian nucleus. FIG. 63C illustrates mammalian expression of SpCas9 and SpRNase III driven by the constitutive EF1a promoter and tracrRNA and pre-crRNA array (DR-Spacer-DR) driven by the RNA Po13 promoter U6 to promote precise transcription initiation and termination. A protospacer from the human EMX1 locus with a satisfactory PAM sequence is used as the spacer in the pre-crRNA array. FIG. 63D illustrates surveyor nuclease assay for SpCas9-mediated minor insertions and deletions. SpCas9 was expressed with and without SpRNase III, tracrRNA, and a pre-crRNA array carrying the EMX1-target spacer. FIG. 63E illustrates a schematic representation of base pairing between target locus and EMX1-targeting crRNA, as well as an example chromatogram showing a micro deletion adjacent to the SpCas9 cleavage site. FIG. 63F illustrates mutated alleles identified from sequencing analysis of 43 clonal amplicons showing a variety of micro insertions and deletions. Dashes indicate deleted bases, and non-aligned or mismatched bases indicate insertions or mutations. Scale ba=10 μm.

[0575] To further simplify the three-component system, a chimeric crRNA-tracrRNA hybrid design was adapted, where a mature crRNA (comprising a guide sequence) is fused to a partial tracrRNA via a stem-loop to mimic the natural crRNA:tracrRNA duplex (FIG. 64A). To increase co-delivery efficiency, a bicistronic expression vector was created to drive co-expression of a chimeric RNA and SpCas9 in transfected cells (FIGS. 64A and 69). In parallel, the bicistronic vectors were used to express a pre-crRNA (DR-guide sequence-DR) with SpCas9, to induce processing into crRNA with a separately expressed trcrRNA (compare FIG. 24B top and bottom). FIG. 31 provides schematic illustrations of bicistronic expression vectors for pre-crRNA array (FIG. 31A) or chimeric crRNA (represented by the short line downstream of the guide sequence insertion site and upstream of the EF1α promoter in FIG. 31B) with hSpCas9, showing location of various elements and the point of guide sequence insertion. The expanded sequence around the location of the guide sequence insertion site in FIG. 31B also shows a partial DR sequence (GTTTAGAGCTA) (SEQ ID NO: 534) and a partial tracrRNA sequence (TAGCAAGTTAAAATAAGGCTAGTCCGTTrTT) (SEQ ID NO: 535). Guide sequences can be inserted between BbsI sites using annealed oligonucleotides. Sequence design for the oligonucleotides are shown below the schematic illustrations in FIG. 31, with appropriate ligation adapters indicated. WPRE represents the Woodchuck hepatitis virus post-transcriptional regulatory element. The efficiency of chimeric RNA-mediated cleavage was tested by targeting the same EMX1 locus described above. Using both Surveyor assay and Sanger sequencing of amplicons, we confirmed that the chimeric RNA design facilitates cleavage of human EMX1 locus with approximately a 4.7% modification rate (FIG. 64B).

[0576] Generalizability of CRISPR-mediated cleavage in eukaryotic cells was tested by targeting additional genomic loci in both human and mouse cells by designing chimeric RNA targeting multiple sites in the human EMX1 and PVALB, as well as the mouse Th loci. FIG. 32 illustrates the selection of some additional targeted protospacers in human PVALB (FIG. 32A) and mouse Th (FIG. 32B) loci. Schematics of the gene loci and the location of three protospacers within the last exon of each are provided. The underlined sequences include 30 bp of protospacer sequence and 3 bp at the 3′ end corresponding to the PAM sequences. Protospacers on the sense and anti-sense strands are indicated above and below the DNA sequences, respectively. A modification rate of 6.3% and 0.75% was achieved for the human PVALB and mouse Th loci respectively, demonstrating the broad applicability of the CRISPR system in modifying different loci across multiple organisms (FIGS. 64B and 67). While, cleavage was only detected with one out of three spacers for each locus using the chimeric constructs, all target sequences were cleaved with efficiency of indel production reaching 27% when using the co-expressed pre-crRNA arrangement (FIG. 67).

[0577] FIG. 24 provides a further illustration that SpCas9 can be reprogrammed to target multiple genomic loci in mammalian cells. FIG. 24A provides a schematic of the human EMX locus showing the location of five protospacers, indicated by the underlined sequences. FIG. 24B provides a schematic of the pre-crRNA/trcrRNA complex showing hybridization between the direct repeat region of the pre-crRNA and tracrRNA (top), and a schematic of a chimeric RNA design comprising a 20 bp guide sequence, and tracr mate and tracr sequences consisting of partial direct repeat and tracrRNA sequences hybridized in a hairpin structure (bottom). Results of a Surveyor assay comparing the efficacy of Cas9-mediated cleavage at five protospacers in the human EMX1 locus is illustrated in FIG. 24C. Each protospacer is targeted using either processed pre-crRNA/tracrRNA complex (crRNA) or chimeric RNA (chiRNA).

[0578] Since the secondary structure of RNA can be crucial for intermolecular interactions, a structure prediction algorithm based on minimum free energy and Boltzmann-weighted structure ensemble was used to compare the putative secondary structure of all guide sequences used in our genome targeting experiment (FIG. 64B) (see e.g. Gruber et al., 2008, Nucleic Acids Research, 36: W70). Analysis revealed that in most cases, the effective guide sequence in the chimeric crRNA context were substantially free of secondary structure motifs, whereas the ineffective guide sequences were more likely to form internal secondary structures that could prevent base pairing with the target protospacer DNA. It is thus possible that variability in the spacer secondary structure might impact the efficiency of CRISPR-mediated interference when using a chimeric crRNA.

[0579] FIG. 64 illustrates example expression vectors. FIG. 64A provides a schematic of a bi-cistronic vector for driving the expression of a synthetic crRNA-tracrRNA chimera (chimeric RNA) as well as SpCas9. The chimeric guide RNA contains a 20-bp guide sequence corresponding to the protospacer in the genomic target site. FIG. 64B provides a schematic showing guide sequences targeting the human EMX1, PVALB, and mouse Th loci, as well as their predicted secondary structures. The modification efficiency at each target site is indicated below the RNA secondary structure drawing (EMX1, n=216 amplicon sequencing reads; PVALB, n=224 reads; Th, n=265 reads). The folding algorithm produced an output with each base colored according to its probability of assuming the predicted secondary structure, as indicated by a rainbow scale that is reproduced in FIG. 64B in gray scale.

[0580] To test whether spacers containing secondary structures are able to function in prokaryotic cells where CRISPRs naturally operate, transformation interference of protospacer-bearing plasmids were tested in an E. coli strain heterologously expressing the S. pyogenes SF370 CRISPR locus 1 (FIG. 70). The CRISPR locus was cloned into a low-copy E. coli expression vector and the crRNA array was replaced with a single spacer flanked by a pair of DRs (pCRISPR). E. coli strains harboring different pCRISPR plasmids were transformed with challenge plasmids containing the corresponding protospacer and PAM sequences (FIG. 70C). In the bacterial assay, all spacers facilitated efficient CRISPR interference (FIG. 64C). These results suggest that there may be additional factors affecting the efficiency of CRISPR activity in mammalian cells.

[0581] To investigate the specificity of CRISPR-mediated cleavage, the effect of single-nucleotide mutations in the guide sequence on protospacer cleavage in the mammalian genome was analyzed using a series of EMX1-targeting chimeric crRNAs with single point mutations (FIG. 25A). FIG. 25B illustrates results of a Surveyor nuclease assay comparing the cleavage efficiency of Cas9 when paired with different mutant chimeric RNAs. Single-base mismatch up to 12-bp 5′ of the PAM substantially abrogated genomic cleavage by SpCas9, whereas spacers with mutations at farther upstream positions retained activity against the original protospacer target (FIG. 25B). In addition to the PAM, SpCas9 has single-base specificity within the last 12-bp of the spacer. Furthermore, CRISPR is able to mediate genomic cleavage as efficiently as a pair of TALE nucleases (TALEN) targeting the same EMX1 protospacer. FIG. 25C provides a schematic showing the design of TALENs targeting EMX1, and FIG. 25D shows a Surveyor gel comparing the efficiency of TALEN and Cas9 (n=3).

[0582] Having established a set of components for achieving CRISPR-mediated gene editing in mammalian cells through the error-prone NHEJ mechanism, the ability of CRISPR to stimulate homologous recombination (HR), a high fidelity gene repair pathway for making precise edits in the genome, was tested. The wild type SpCas9 is able to mediate site-specific DSB, which can be repaired through both NHEJ and HR. In addition, an aspartate-to-alanine substitution (D10A) in the RuvC I catalytic domain of SpCas9 was engineered to convert the nuclease into a nickase (SpCas9n; illustrated in FIG. 26A) (see e.g. Sapranausaks et al., 2011, Cucleic Acis Research, 39: 9275; Gasiunas et al., 2012, Proc. Natl. Acad. Sci. USA, 109:E2579), such that nicked genomic DNA undergoes the high-fidelity homology-directed repair (HDR). Surveyor assay confirmed that SpCas9n does not generate indels at the EMX1 protospacer target. As illustrated in FIG. 26B, co-expression of EMX-targeting chimeric crRNA with SpCas9 produced indels in the target site, whereas co-expression with SpCas9n did not (n=3). Moreover, sequencing of 327 amplicons did not detect any indels induced by SpCas9n. The same locus was selected to test CRISPR-mediated HR by co-transfecting HEK 293FT cells with the chimeric RNA targeting EMX1, hSpCas9 or hSpCas9n, as well as a HR template to introduce a pair of restriction sites (HindIII and Nhe1) near the protospacer. FIG. 26C provides a schematic illustration of the HR strategy, with relative locations of recombination points and primer annealing sequences (anows). SpCas9 and SpCas9n indeed catalyzed integration of the HR template into the EMX1 locus. PCR amplification of the target region followed by restriction digest with HindIII revealed cleavage products corresponding to expected fragment sizes (anows in restriction fragment length polymorphism gel analysis shown in FIG. 26D), with SpCas9 and SpCas9n mediating similar levels of HR efficiencies. We further verified HR using Sanger sequencing of genomic amplicons (FIG. 26E). These results demonstrate the utility of CRISPR for facilitating targeted gene insertion in the mammalian genome. Given the 14-bp (12-bp from the spacer and 2-bp from the PAM) target specificity of the wild type SpCas9, the availability of a nickase can significantly reduce the likelihood of off-target modifications, since single strand breaks are not substrates for the enor-prone NHEJ pathway.

[0583] Expression constructs mimicking the natural architecture of CRISPR loci with anayed spacers (FIG. 63A) were constructed to test the possibility of multiplexed sequence targeting. Using a single CRISPR array encoding a pair of EMX1- and PVALB-targeting spacers, efficient cleavage at both loci was detected (FIG. 26F, showing both a schematic design of the crRNA anay and a Surveyor blot showing efficient mediation of cleavage). Targeted deletion of larger genomic regions through concurrent DSBs using spacers against two targets within EMX1 spaced by 119 bp was also tested, and a 1.6% deletion efficacy (3 out of 182 amplicons; FIG. 26G) was detected. This demonstrates that the CRISPR system can mediate multiplexed editing within a single genome.

### Example 15

### CRISPR System Modifications and Alternatives

[0584] The ability to use RNA to program sequence-specific DNA cleavage defines a new class of genome engineering tools for a variety of research and industrial applications. Several aspects of the CRISPR system can be further improved to increase the efficiency and versatility of CRISPR targeting. Optimal Cas9 activity may depend on the availability of free Mg²⁺ at levels higher than that present in the mammalian nucleus (see e.g. Jinek et al., 2012, Science, 337:816), and the preference for an NGG motif immediately downstream of the protospacer restricts the ability to target on average every 12-bp in the human genome (FIG. 33, evaluating both plus and minus strands of human chromosomal sequences). Some of these constraints can be overcome by exploring the diversity of CRISPR loci across the microbial metagenome (see e.g. Makarova et al., 2011, Nat Rev Microbiol, 9:467). Other CRISPR loci may be transplanted into the mammalian cellular milieu by a process similar to that described in Example 1. For example, FIG. 67 illustrates adaptation of the Type II CRISPR system from CRISPR locus 2 of Streptococcus thermophilus LMD-9 for heterologous expression in mammalian cells to achieve CRISPR-mediated genome editing. FIG. 67A provides a Schematic illustration of the CRISPR locus 2 from S. thermophilus LMD-9. FIG. 67B illustrates the design of an expression system for the S. thermophilus CRISPR system. Human codon-optimized hStCas9 is expressed using a constitutive EF1a promoter. Mature versions of tracrRNA and crRNA are expressed using the U6 promoter to promote precise transcription initiation. Sequences from the mature crRNA and tracrRNA are illustrated. A single base indicated by the lower case “a” in the crRNA sequence is used to remove the polyU sequence, which serves as a RNA polIII transcriptional terminator. FIG. 67C provides a schematic showing guide sequences targeting the human EMX1 locus as well as their predicted secondary structures. The modification efficiency at each target site is indicated below the RNA secondary structures. The algorithm generating the structures colors each base according to its probability of assuming the predicted secondary structure, which is indicated by a rainbow scale reproduced in FIG. 67C in gray scale. FIG. 67D shows the results of hStCas9-mediated cleavage in the target locus using the Surveyor assay. RNA guide spacers 1 and 2 induced 14% and 6.4%, respectively. Statistical analysis of cleavage activity across biological replica at these two protospacer sites is also provided in FIG. 65. FIG. 34C provides a schematic of additional protospacer and corresponding PAM sequence targets of the S. thermophilus CRISPR system in the human EMX1 locus. Two protospacer sequences are highlighted and their corresponding PAM sequences satisfying NNAGAAW motif are indicated by underlining 3′ with respect to the corresponding highlighted sequence. Both protospacers target the anti-sense strand.

### Example 16

### Sample Target Sequence Selection Algorithm

[0585] A software program is designed to identify candidate CRISPR target sequences on both strands of an input DNA sequence based on desired guide sequence length and a CRISPR motif sequence (PAM) for a specified CRISPR enzyme. For example, target sites for Cas9 from S. pyogenes, with PAM sequences NGG, may be identified by searching for 5′-Nx-NGG-3′ both on the input sequence and on the reverse-complement of the input. Likewise, target sites for Cas9 of S. thermophilus CRISPR1, with PAM sequence NNAGAAW, may be identified by searching for 5′-Nₓ-NNAGAAW-3′ (SEQ ID NO: 536) both on the input sequence and on the reverse-complement of the input. Likewise, target sites for Cas9 of S. thermophilus CRISPR3, with PAM sequence NGGNG, may be identified by searching for 5′-Nₓ-NGGNG-3′ both on the input sequence and on the reverse-complement of the input. The value “x” in Nₓ may be fixed by the program or specified by the user, such as 20.

[0586] Since multiple occurrences in the genome of the DNA target site may lead to nonspecific genome editing, after identifying all potential sites, the program filters out sequences based on the number of times they appear in the relevant reference genome. For those CRISPR enzymes for which sequence specificity is determined by a ‘seed’ sequence, such as the 11-12 bp 5′ from the PAM sequence, including the PAM sequence itself, the filtering step may be based on the seed sequence. Thus, to avoid editing at additional genomic loci, results are filtered based on the number of occurrences of the seed:PAM sequence in the relevant genome. The user may be allowed to choose the length of the seed sequence. The user may also be allowed to specify the number of occurrences of the seed:PAM sequence in a genome for purposes of passing the filter. The default is to screen for unique sequences. Filtration level is altered by changing both the length of the seed sequence and the number of occurrences of the sequence in the genome. The program may in addition or alternatively provide the sequence of a guide sequence complementary to the reported target sequence(s) by providing the reverse complement of the identified target sequence(s).

[0587] This target sequence identifier tool is applicable for identifying target in any genome, such as human, mouse, rate, and C. elegans.

[0588] Sequences (SEQ ID NOS 74-77, 537-543, 81, 599 and 83, respectively, in order of appearance) described in the above examples are as follows:

U6-short tracrRNA (Streptococcus pyogenes SF370):
GAGGGCCTATTTCCCATGATTCCTTCATATTTGCATATACGATACAAGGCTGTTAGAGAGATAAT
TGGAATTAATTTGACTGTAAACACAAAGATATTAGTACAAAATACGTGACGTAGAAAGTAATAA
TTTCTTGGGTAGTTTGCAGTTTTAAAATTATGTTTTAAAATGGACTATCATATGCTTACCGTAACT
TGAAAGTATTTCGATTTCTTGGCTTTATATATCTTGTGGAAAGGACGAAACACCGGAACCATTCA
AAACAGCATAGCAAGTTAAAATAAGGCTAGTCCGTTATCAACTTGAAAAAGTGGCACCGAGTCG
GTGCTTTTTTT
U6-long tracrRNA (Streptococcus pyogenes SF370):
GAGGGCCCATTTCCCATGATTCCTTCATATTTGCATATACGATACAAGGCTGTTAGAGAGATAAT
TGGAATTAATTTGACTGTAAACACAAAGATATTAGTACAAAATACGTGACGTAGAAAGTAATAA
TTTCTTGGGTAGTTTGCAGTTTTAAAATTATGTTTTAAAATGGACTATCATATGCTTACCGTAACT
TGAAAGTATTTCGATTTCTTGGCTTTATATATCTTGTGGAAAGGACGAAACACCGGTAGTATTAA
GTATTGTTTTATGGCTGATAAATTTCTTTGAATTTCTCCTTGATTATTTGTTATAAAAGTTATAAA
ATAATCTTGTTGGAACCATTCAAAACAGCATAGCAAGTTAAAATAAGGCTAGTCCGTTATCAAC
TTGAAAAAGTGGCACCGAGTCGGTGCTTTTTTT
U6-DR-BbsI backbone-DR (Streptococcus pyogenes SF370):
GAGGGCCTATTTCCCATGATTCCTTCATATTTGCATATACGATACAAGGCTGTTAGAGAGATAAT
TGGAATTAATTTGACTGTAAACACAAAGATATTAGTACAAAATACGTGACGTAGAAAGTAATAA
TTTCTTGGGTAGTTTGCAGTTTTAAAATTATGTTTTAAAATGGACTATCATATGCTTACCGTAACT
TGAAAGTATTTCGATTTCTTGGCTTTATATATCTTGTGGAAAGGACGAAACACCGGGTTTTAGAG
CTATGCTGTTTTGAATGGTCCCAAAACGGGTCTTCGAGAAGACGTTTTAGAGCTATGCTGTTTTG
AATGGTCCCAAAAC
U6-chimeric RNA-BbsI backbone (Streptococcus pyogenes SF370)
GAGGGCCTATTTCCCATGATTCCTTCATATTTGCATATACGATACAAGGCTGTTAGAGAGATAAT
TGGAATTAATTTGACTGTAAACACAAAGATATTAGTACAAAATACGTGACGTAGAAAGTAATAA
TTTCTTGGGTAGTTTGCAGTTTTAAAATTATGTTTTAAAATGGACTATCATATGCTTACCGTAACT
TGAAAGTATTTCGATTTCTTGGCTTTATATATCTTGTGGAAAGGACGAAACACCGGGTCTTCGAG
AAGACCTGTTTTAGAGCTAGAAATAGCAAGTTAAAATAAGGCTAGTCCG
NLS-SpCas9-EGFP:
MDYKDHDGDYKDHDIDYKDDDDKMAPKKKRKVGIHGVPAADKKYSIGLDIGTNSVGWAVITDEY
KVPSKKFKVLGNTDRHSIKKNLIGALLFDSGETAEATRLKRTARRRYTRRKNRICYLQEIFSNEMAKV
DDSFFHRLEESFLVEEDKKHERHPIFGNIVDEVAYHEKYPTIYHLRKKLVDSTDKADLRLIYLALAHM
IKFRGHFLIEGDLNPDNSDVDKLFIQLVQTYNQLFEENPINASGVDAKAILSARLSKSRRLENLIAQLP
GEKKNGLFGNLIALSLGLTPNFKSNFDLAEDAKLQLSKDTYDDDLDNLLAQIGDQYADLFLAAKNLS
DAILLSDILRVNTEITKAPLSASMIKRYDEHHQDLTLLKALVRQQLPEKYKEIFFDQSKNGYAGYIDG
GASQEEFYKFIKPILEKMDGTEELLVKLNREDLLRKQRTFDNGSIPHQIHLGELHAILRRQEDFYPFLK
DNREKIEKILTFRIPYYVGPLARGNSRFAWMTRKSEETITPWNFEEVVDKGASAQSFIERMTNFDKNL
PNEKVLPKHSLLYEYFTVYNELTKVKYVTEGMRKPAFLSGEQKKAIVDLLFKTNRKVTVKQLKEDY
FKKIECFDSVEISGVEDRFNASLGTYHDLLKIIKDKDFLDNEENEDILEDIVLTLTLFEDREMIEERLKT
YAHLFDDKVMKQLKRRRYTGWGRLSRKLINGIRDKQSGKTILDFLKSDGFANRNFMQLIHDDSLTF
KEDIQKAQVSGQGDSLHEHIANLAGSPAIKKGILQTVKVVDELVKVMGRHKPENIVIEMARENQTTQ
KGQKNSRERMKRIEEGIKELGSQILKEHPVENTQLQNEKLYLYYLQNGRDMYVDQELDINRLSDYD
VDHIVPQSFLKDDSIDNKVLTRSDKNRGKSDNVPSEEVVKKMKNYWRQLLNAKLITQRKFDNLTKA
ERGGLSELDKAGFIKRQLVETRQITKHVAQILDSRMNTKYDENDKLIREVKVITLKSKLVSDFRKDFQ
FYKVREINNYHHAHDAYLNAVVGTALIKKYPKLESEFVYGDYKVYDVRKMIAKSEQEIGKATAKYF
FYSNIMNFFKTEITLANGEIRKRPLIETNGETGEIVWDKGRDFATVRKVLSMPQVNIVKKTEVQTGGF
SKESILPKRNSDKLIARKKDWDPKKYGGFDSPTVAYSVLVVAKVEKGKSKKLKSVKELLGITIMERS
SFEKNPIDFLEAKGYKEVKKDLIIKLPKYSLFELENGRKRMLASAGELQKGNELALPSKYVNFLYLAS
HYEKLKGSPEDNEQKQLFVEQHKHYLDEIIEQISEFSKRVILADANLDKVLSAYNKHRDKPIREQAEN
IIHLFTLTNLGAPAAFKYFDTTIDRKRYTSTKEVLDATLIHQSITGLYETRIDLSQLGGDAAAVSKGEE
LFTGVVPILVELDGDVNGHKFSVSGEGEGDATYGKLTLKFICTTGKLPVPWPTLVTTLTYGVQCFSR
YPDHMKQHDFFKSAMPEGYVQERTIFFKDDGNYKTRAEVKFEGDTLVNRIELKGIDFKEDGNILGHK
LEYNYNSHNVYIMADKQKNGIKVNFKIRHNIEDGSVQLADHYQQNTPIGDGPVLLPDNHYLSTQSAL
SKDPNEKRDHMVLLEFVTAAGITLGMDELYK
SpCas9-EGFP-NLS:
MDKKYSIGLDIGTNSVGWAVITDEYKVPSKKFKVLGNTDRHSIKKNLIGALLFDSGETAEATRLKRT
ARRRYTRRKNRICYLQEIFSNEMAKVDDSFFHRLEESFLVEEDKKHERHPIFGNIVDEVAYHEKYPTI
YHLRKKLVDSTDKADLRLIYLALAHMIKFRGHFLIEGDLNPDNSDVDKLFIQLVQTYNQLFEENPINA
SGVDAKAILSARLSKSRRLENLIAQLPGEKKNGLFGNLIALSLGLTPNFKSNFDLAEDAKLQLSKDTY
DDDLDNLLAQIGDQYADLFLAAKNLSDAILLSDILRVNTEITKAPLSASMIKRYDEHHQDLTLLKALV
RQQLPEKYKEIFFDQSKNGYAGYIDGGASQEEFYKFIKPILEKMDGTEELLVKLNREDLLRKQRTFDN
GSIPHQIHLGELHAILRRQEDFYPFLKDNREKIEKILTFRIPYYVGPLARGNSRFAWMTRKSEETITPW
NFEEVVDKGASAQSFIERMTNFDKNLPNEKVLPKHSLLYEYFTVYNELTKVKYVTEGMRKPAFLSG
EQKKAIVDLLFKTNRKVTVKQLKEDYFKKIECFDSVEISGVEDRFNASLGTYHDLLKIIKDKDFLDNE
ENEDILEDIVLTLTLFEDREMIEERLKTYAHLFDDKVMKQLKRRRYTGWGRLSRKLINGIRDKQSGK
TILDFLKSDGFANRNFMQLIHDDSLTFKEDIQKAQVSGQGDSLHEHIANLAGSPAIKKGILQTVKVVD
ELVKVMGRHKPENIVIEMARENQTTQKGQKNSRERMKRIEEGIKELGSQILKEHPVENTQLQNEKLY
LYYLQNGRDMYVDQELDINRLSDYDVDHIVPQSFLKDDSIDNKVLTRSDKNRGKSDNVPSEEVVKK
MKNYWRQLLNAKLITQRKFDNLTKAERGGLSELDKAGFIKRQLVETRQITKHVAQILDSRMNTKYD
ENDKLIREVKVITLKSKLVSDFRKDFQFYKVREINNYHHAHDAYLNAVVGTALIKKYPKLESEFVYG
DYKVYDVRKMIAKSEQEIGKATAKYFFYSNIMNFFKTEITLANGEIRKRPLIETNGETGEIVWDKGRD
FATVRKVLSMPQVNIVKKTEVQTGGFSKESILPKRNSDKLIARKKDWDPKKYGGFDSPTVAYSVLVV
AKVEKGKSKKLKSVKELLGITIMERSSFEKNPIDFLEAKGYKEVKKDLIIKLPKYSLFELENGRKRML
ASAGELQKGNELALPSKYVNFLYLASHYEKLKGSPEDNEQKQLFVEQHKHYLDEIIEQISEFSKRVIL
ADANLDKVLSAYNKHRDKPIREQAENIIHLFTLTNLGAPAAFKYFDTTIDRKRYTSTKEVLDATLIHQ
SITGLYETRIDLSQLGGDAAAVSKGEELFTGVVPILVELDGDVNGHKFSVSGEGEGDATYGKLTLKFI
CTTGKLPVPWPTLVTTLTYGVQCFSRYPDHMKQHDFFKSAMPEGYVQERTIFFKDDGNYKTRAEVK
FEGDTLVNRIELKGIDFKEDGNILGHKLEYNYNSHNVYIMADKQKNGIKVNFKIRHNIEDGSVQLAD
HYQQNTPIGDGPVLLPDNHYLSTQSALSKDPNEKRDHMVLLEFVTAAGITLGMDELYKKRPAATKK
AGQAKKKK
NLS-SpCas9-EGFP-NLS:
MDYKDHDGDYKDHDIDYKDDDDKMAPKKKRKVGIHGVPAADKKYSIGLDIGTNSVGWAVITDEY
KVPSKKFKVLGNTDRHSIKKNLIGALLFDSGETAEATRLKRTARRRYTRRKNRICYLQEIFSNEMAKV
DDSFFHRLEESFLVEEDKKHERHPIFGNIVDEVAYHEKYPTIYHLRKKLVDSTDKADLRLIYLALAHM
IKFRGHFLIEGDLNPDNSDVDKLFIQLVQTYNQLFEENPINASGVDAKAILSARLSKSRRLENLIAQLP
GEKKNGLFGNLIALSLGLTPNFKSNFDLAEDAKLQLSKDTYDDDLDNLLAQIGDQYADLFLAAKNLS
DAILLSDILRVNTEITKAPLSASMIKRYDEHHQDLTLLKALVRQQLPEKYKEIFFDQSKNGYAGYIDG
GASQEEFYKFIKPILEKMDGTEELLVKLNREDLLRKQRTFDNGSIPHQIHLGELHAILRRQEDFYPFLK
DNREKIEKILTFRIPYYVGPLARGNSRFAWMTRKSEETITPWNFEEVVDKGASAQSFIERMTNFDKNL
PNEKVLPKHSLLYEYFTVYNELTKVKYVTEGMRKPAFLSGEQKKAIVDLLFKTNRKVTVKQLKEDY
FKKIECFDSVEISGVEDRFNASLGTYHDLLKIIKDKDFLDNEENEDILEDIVLTLTLFEDREMIEERLKT
YAHLFDDKVMKQLKRRRYTGWGRLSRKLINGIRDKQSGKTILDFLKSDGFANRNFMQLIHDDSLTF
KEDIQKAQVSGQGDSLHEHIANLAGSPAIKKGILQTVKVVDELVKVMGRHKPENIVIEMARENQTTQ
KGQKNSRERMKRIEEGIKELGSQILKEHPVENTQLQNEKLYLYYLQNGRDMYVDQELDINRLSDYD
VDHIVPQSFLKDDSIDNKVLTRSDKNRGKSDNVPSEEVVKKMKNYWRQLLNAKLITQRKFDNLTKA
ERGGLSELDKAGFIKRQLVETRQITKHVAQILDSRMNTKYDENDKLIREVKVITLKSKLVSDFRKDFQ
FYKVREINNYHHAHDAYLNAVVGTALIKKYPKLESEFVYGDYKVYDVRKMIAKSEQEIGKATAKYF
FYSNIMNFFKTEITLANGEIRKRPLIETNGETGEIVWDKGRDFATVRKVLSMPQVNIVKKTEVQTGGF
SKESILPKRNSDKLIARKKDWDPKKYGGFDSPTVAYSVLVVAKVEKGKSKKLKSVKELLGITIMERS
SFEKNPIDFLEAKGYKEVKKDLIIKLPKYSLFELENGRKRMLASAGELQKGNELALPSKYVNFLYLAS
HYEKLKGSPEDNEQKQLFVEQHKHYLDEIIEQISEFSKRVILADANLDKVLSAYNKHRDKPIREQAEN
IIHLFTLTNLGAPAAFKYFDTTIDRKRYTSTKEVLDATLIHQSITGLYETRIDLSQLGGDAAAVSKGEE
LFTGVVPILVELDGDVNGHKFSVSGEGEGDATYGKLTLKFICTTGKLPVPWPTLVTTLTYGVQCFSR
YPDHMKQHDFFKSAMPEGYVQERTIFFKDDGNYKTRAEVKFEGDTLVNRIELKGIDFKEDGNILGHK
LEYNYNSHNVYIMADKQKNGIKVNFKIRHNIEDGSVQLADHYQQNTPIGDGPVLLPDNHYLSTQSAL
SKDPNEKRDHMVLLEFVTAAGITLGMDELYKKRPAATKKAGQAKKKK
NLS-SpCas9-NLS:
MDYKDHDGDYKDHDIDYKDDDDKMAPKKKRKVGIHGVPAADKKYSIGLDIGTNSVGWAVITDEY
KVPSKKFKVLGNTDRHSIKKNLIGALLFDSGETAEATRLKRTARRRYTRRKNRICYLQEIFSNEMAKV
DDSFFHRLEESFLVEEDKKHERHPIFGNIVDEVAYHEKYPTIYHLRKKLVDSTDKADLRLIYLALAHM
IKFRGHFLIEGDLNPDNSDVDKLFIQLVQTYNQLFEENPINASGVDAKAILSARLSKSRRLENLIAQLP
GEKKNGLFGNLIALSLGLTPNFKSNFDLAEDAKLQLSKDTYDDDLDNLLAQIGDQYADLFLAAKNLS
DAILLSDILRVNTEITKAPLSASMIKRYDEHHQDLTLLKALVRQQLPEKYKEIFFDQSKNGYAGYIDG
GASQEEFYKFIKPILEKMDGTEELLVKLNREDLLRKQRTFDNGSIPHQIHLGELHAILRRQEDFYPFLK
DNREKIEKILTFRIPYYVGPLARGNSRFAWMTRKSEETITPWNFEEVVDKGASAQSFIERMTNFDKNL
PNEKVLPKHSLLYEYFTVYNELTKVKYVTEGMRKPAFLSGEQKKAIVDLLFKTNRKVTVKQLKEDY
FKKIECFDSVEISGVEDRFNASLGTYHDLLKIIKDKDFLDNEENEDILEDIVLTLTLFEDREMIEERLKT
YAHLFDDKVMKQLKRRRYTGWGRLSRKLINGIRDKQSGKTILDFLKSDGFANRNFMQLIHDDSLTF
KEDIQKAQVSGQGDSLHEHIANLAGSPAIKKGILQTVKVVDELVKVMGRHKPENIVIEMARENQTTQ
KGQKNSRERMKRIEEGIKELGSQILKEHPVENTQLQNEKLYLYYLQNGRDMYVDQELDINRLSDYD
VDHIVPQSFLKDDSIDNKVLTRSDKNRGKSDNVPSEEVVKKMKNYWRQLLNAKLITQRKFDNLTKA
ERGGLSELDKAGFIKRQLVETRQITKHVAQILDSRMNTKYDENDKLIREVKVITLKSKLVSDFRKDFQ
FYKVREINNYHHAHDAYLNAVVGTALIKKYPKLESEFVYGDYKVYDVRKMIAKSEQEIGKATAKYF
FYSNIMNFFKTEITLANGEIRKRPLIETNGETGEIVWDKGRDFATVRKVLSMPQVNIVKKTEVQTGGF
SKESILPKRNSDKLIARKKDWDPKKYGGFDSPTVAYSVLVVAKVEKGKSKKLKSVKELLGITIMERS
SFEKNPIDFLEAKGYKEVKKDLIIKLPKYSLFELENGRKRMLASAGELQKGNELALPSKYVNFLYLAS
HYEKLKGSPEDNEQKQLFVEQHKHYLDEIIEQISEFSKRVILADANLDKVLSAYNKHRDKPIREQAEN
IIHLFTLTNLGAPAAFKYFDTTIDRKRYTSTKEVLDATLIHQSITGLYETRIDLSQLGGDKRPAATKKA
GQAKKKK
NLS-mCherry-SpRNase3:
MFLFLSLTSFLSSSRTLVSKGEEDNMAIIKEFMRFKVHMEGSVNGHEFEIEGEGEGRPYEGTQTAKLK
VTKGGPLPFAWDILSPQFMYGSKAYVKHPADIPDYLKLSFPEGFKWERVMNFEDGGVVTVTQDSSL
QDGEFIYKVKLRGTNFPSDGPVMQKKTMGWEASSERMYPEDGALKGEIKQRLKLKDGGHYDAEVK
TTYKAKKPVQLPGAYNVNIKLDITSHNEDYTIVEQYERAEGRHSTGGMDELYKGSKQLEELLSTSFDI
QFNDLTLLETAFTHTSYANEHRLLNVSHNERLEFLGDAVLQLIISEYLFAKYPKKTEGDMSKLRSMIV
REESLAGFSRFCSFDAYIKLGKGEEKSGGRRRDTILGDLFEAFLGALLLDKGIDAVRRFLKQVMIPQV
EKGNFERVKDYKTCLQEFLQTKGDVAIDYQVISEKGPAHAKQFEVSIVVNGAVLSKGLGKSKKLAE
QDAAKNALAQLSEV
SpRNase3-mCherry-NLS:
MKQLEELLSTSFDIQFNDLTLLETAFTHTSYANEHRLLNVSHNERLEFLGDAVLQLIISEYLFAKYPKK
TEGDMSKLRSMIVREESLAGFSRFCSFDAYIKLGKGEEKSGGRRRDTILGDLFEAFLGALLLDKGIDA
VRRFLKQVMIPQVEKGNFERVKDYKTCLQEFLQTKGDVAIDYQVISEKGPAHAKQFEVSIVVNGAV
LSKGLGKSKKLAEQDAAKNALAQLSEVGSVSKGEEDNMAIIKEFMRFKVHMEGSVNGHEFEIEGEG
EGRPYEGTQTAKLKVTKGGPLPFAWDILSPQFMYGSKAYVKHPADIPDYLKLSFPEGFKWERVMNF
EDGGVVTVTQDSSLQDGEFIYKVKLRGTNFPSDGPVMQKKTMGWEASSERMYPEDGALKGEIKQR
LKLKDGGHYDAEVKTTYKAKKPVQLPGAYNVNIKLDITSHNEDYTIVEQYERAEGRHSTGGMDELY
KKRPAATKKAGQAKKKK
NLS-SpCas9n-NLS (the D10A nickase mutation is lowercase):
MDYKDHDGDYKDHDIDYKDDDDKMAPKKKRKVGIHGVPAADKKYSIGLaIGTNSVGWAVITDEYK
VPSKKFKVLGNTDRHSIKKNLIGALLFDSGETAEATRLKRTARRRYTRRKNRICYLQEIFSNEMAKVD
DSFFHRLEESFLVEEDKKHERHPIFGNIVDEVAYHEKYPTIYHLRKKLVDSTDKADLRLIYLALAHMI
KFRGHFLIEGDLNPDNSDVDKLFIQLVQTYNQLFEENPINASGVDAKAILSARLSKSRRLENLIAQLPG
EKKNGLFGNLIALSLGLTPNFKSNFDLAEDAKLQLSKDTYDDDLDNLLAQIGDQYADLFLAAKNLSD
AILLSDILRVNTEITKAPLSASMIKRYDEHHQDLTLLKALVRQQLPEKYKEIFFDQSKNGYAGYIDGG
ASQEEFYKFIKPILEKMDGTEELLVKLNREDLLRKQRTFDNGSIPHQIHLGELHAILRRQEDFYPFLKD
NREKIEKILTFRIPYYVGPLARGNSRFAWMTRKSEETITPWNFEEVVDKGASAQSFIERMTNFDKNLP
NEKVLPKHSLLYEYFTVYNELTKVKYVTEGMRKPAFLSGEQKKAIVDLLFKTNRKVTVKQLKEDYF
KKIECFDSVEISGVEDRFNASLGTYHDLLKIIKDKDFLDNEENEDILEDIVLTLTLFEDREMIEERLKTY
AHLFDDKVMKQLKRRRYTGWGRLSRKLINGIRDKQSGKTILDFLKSDGFANRNFMQLIHDDSLTFKE
DIQKAQVSGQGDSLHEHIANLAGSPAIKKGILQTVKVVDELVKVMGRHKPENIVIEMARENQTTQKG
QKNSRERMKRIEEGIKELGSQILKEHPVENTQLQNEKLYLYYLQNGRDMYVDQELDINRLSDYDVD
HIVPQSFLKDDSIDNKVLTRSDKNRGKSDNVPSEEVVKKMKNYWRQLLNAKLITQRKFDNLTKAER
GGLSELDKAGFIKRQLVETRQITKHVAQILDSRMNTKYDENDKLIREVKVITLKSKLVSDFRKDFQFY
KVREINNYHHAHDAYLNAVVGTALIKKYPKLESEFVYGDYKVYDVRKMIAKSEQEIGKATAKYFFY
SNIMNFFKTEITLANGEIRKRPLIETNGETGEIVWDKGRDFATVRKVLSMPQVNIVKKTEVQTGGFSK
ESILPKRNSDKLIARKKDWDPKKYGGFDSPTVAYSVLVVAKVEKGKSKKLKSVKELLGITIMERSSFE
KNPIDFLEAKGYKEVKKDLIIKLPKYSLFELENGRKRMLASAGELQKGNELALPSKYVNFLYLASHY
EKLKGSPEDNEQKQLFVEQHKHYLDEIIEQISEFSKRVILADANLDKVLSAYNKHRDKPIREQAENIIH
LFTLTNLGAPAAFKYFDTTIDRKRYTSTKEVLDATLIHQSITGLYETRIDLSQLGGDKRPAATKKAGQ
AKKKK
hEMX1-HR Template-HindII-NheI:
GAATGCTGCCCTCAGACCCGCTTCCTCCCTGTCCTTGTCTGTCCAAGGAGAATGAGGTCTCACTG
GTGGATTTCGGACTACCCTGAGGAGCTGGCACCTGAGGGACAAGGCCCCCCACCTGCCCAGCTC
CAGCCTCTGATGAGGGGTGGGAGAGAGCTACATGAGGTTGCTAAGAAAGCCTCCCCTGAAGGA
GACCACACAGTGTGTGAGGTTGGAGTCTCTAGCAGCGGGTTCTGTGCCCCCAGGGATAGTCTGG
CTGTCCAGGCACTGCTCTTGATATAAACACCACCTCCTAGTTATGAAACCATGCCCATTCTGCCT
CTCTGTATGGAAAAGAGCATGGGGCTGGCCCGTGGGGTGGTGTCCACTTTAGGCCCTGTGGGAG
ATCATGGGAACCCACGCAGTGGGTCATAGGCTCTCTCATTTACTACTCACATCCACTCTGTGAAG
AAGCGATTATGATCTCTCCTCTAGAAACTCGTAGAGTCCCATGTCTGCCGGCTTCCAGAGCCTGC
ACTCCTCCACCTTGGCTTGGCTTTGCTGGGGCTAGAGGAGCTAGGATGCACAGCAGCTCTGTGAC
CCTTTGTTTGAGAGGAACAGGAAAACCACCCTTCTCTCTGGCCCACTGTGTCCTCTTCCTGCCCT
GCCATCCCCTTCTGTGAATGTTAGACCCATGGGAGCAGCTGGTCAGAGGGGACCCCGGCCTGGG
GCCCCTAACCCTATGTAGCCTCAGTCTTCCCATCAGGCTCTCAGCTCAGCCTGAGTGTTGAGGCC
CCAGTGGCTGCTCTGGGGGCCTCCTGAGTTTCTCATCTGTGCCCCTCCCTCCCTGGCCCAGGTGA
AGGTGTGGTTCCAGAACCGGAGGACAAAGTACAAACGGCAGAAGCTGGAGGAGGAAGGGCCTG
AGTCCGAGCAGAAGAAGAAGGGCTCCCATCACATCAACCGGTGGCGCATTGCCACGAAGCAGG
CCAATGGGGAGGACATCGATGTCACCTCCAATGACaagcttgctagcGGTGGGCAACCACAAACCCAC
GAGGGCAGAGTGCTGCTTGCTGCTGGCCAGGCCCCTGCGTGGGCCCAAGCTGGACTCTGGCCAC
TCCCTGGCCAGGCTTTGGGGAGGCCTGGAGTCATGGCCCCACAGGGCTTGAAGCCCGGGGCCGC
CATTGACAGAGGGACAAGCAATGGGCTGGCTGAGGCCTGGGACCACTTGGCCTTCTCCTCGGAG
AGCCTGCCTGCCTGGGCGGGCCCGCCCGCCACCGCAGCCTCCCAGCTGCTCTCCGTGTCTCCAAT
CTCCCTTTTGTTTTGATGCATTTCTGTTTTAATTTATTTTCCAGGCACCACTGTAGTTTAGTGATCC
CCAGTGTCCCCCTTCCCTATGGGAATAATAAAAGTCTCTCTCTTAATGACACGGGCATCCAGCTC
CAGCCCCAGAGCCTGGGGTGGTAGATTCCGGCTCTGAGGGCCAGTGGGGGCTGGTAGAGCAAA
CGCGTTCAGGGCCTGGGAGCCTGGGGTGGGGTACTGGTGGAGGGGGTCAAGGGTAATTCATTAA
CTCCTCTCTTTTGTTGGGGGACCCTGGTCTCTACCTCCAGCTCCACAGCAGGAGAAACAGGCTAG
ACATAGGGAAGGGCCATCCTGTATCTTGAGGGAGGACAGGCCCAGGTCTTTCTTAACGTATTGA
GAGGTGGGAATCAGGCCCAGGTAGTTCAATGGGAGAGGGAGAGTGCTTCCCTCTGCCTAGAGAC
TCTGGTGGCTTCTCCAGTTGAGGAGAAACCAGAGGAAAGGGGAGGATTGGGGTCTGGGGGAGG
GAACACCATTCACAAAGGCTGACGGTTCCAGTCCGAAGTCGTGGGCCCACCAGGATGCTCACCT
GTCCTTGGAGAACCGCTGGGCAGGTTGAGACTGCAGAGACAGGGCTTAAGGCTGAGCCTGCAAC
CAGTCCCCAGTGACTCAGGGCCTCCTCAGCCCAAGAAAGAGCAACGTGCCAGGGCCCGCTGAGC
TCTTGTGTTCACCTG
NLS-StCsn1-NLS:
MKRPAATKKAGQAKKKKSDLVLGLDIGIGSVGVGILNKVTGEIIHKNSRIFPAAQAENNLVRRTNRQ
GRRLARRKKHRRVRLNRLFEESGLITDFTKISINLNPYQLRVKGLTDELSNEELFIALKNMVKHRGISY
LDDASDDGNSSVGDYAQIVKENSKQLETKTPGQIQLERYQTYGQLRGDFTVEKDGKKHRLINVFPTS
AYRSEALRILQTQQEFNPQITDEFINRYLEILTGKRKYYHGPGNEKSRTDYGRYRTSGETLDNIFGILIG
KCTFYPDEFRAAKASYTAQEFNLLNDLNNLTVPTETKKLSKEQKNQIINYVKNEKAMGPAKLFKYIA
KLLSCDVADIKGYRIDKSGKAEIHTFEAYRKMKTLETLDIEQMDRETLDKLAYVLTLNTEREGIQEAL
EHEFADGSFSQKQVDELVQFRKANSSIFGKGWHNFSVKLMMELIPELYETSEEQMTILTRLGKQKTT
SSSNKTKYIDEKLLTEEIYNPVVAKSVRQAIKIVNAAIKEYGDFDNIVIEMARETNEDDEKKAIQKIQK
ANKDEKDAAMLKAANQYNGKAELPHSVFHGHKQLATKIRLWHQQGERCLYTGKTISIHDLINNSNQ
FEVDHILPLSITFDDSLANKVLVYATANQEKGQRTPYQALDSMDDAWSFRELKAFVRESKTLSNKKK
EYLLTEEDISKFDVRKKFIERNLVDTRYASRVVLNALQEHFRAHKIDTKVSVVRGQFTSQLRRHWGI
EKTRDTYHHHAVDALIIAASSQLNLWKKQKNTLVSYSEDQLLDIETGELISDDEYKESVFKAPYQHF
VDTLKSKEFEDSILFSYQVDSKFNRKISDATIYATRQAKVGKDKADETYVLGKIKDIYTQDGYDAFM
KIYKKDKSKFLMYRHDPQTFEKVIEPILENYPNKQINEKGKEVPCNPFLKYKEEHGYIRKYSKKGNGP
EIKSLKYYDSKLGNHIDITPKDSNNKVVLQSVSPWRADVYFNKTTGKYEILGLKYADLQFEKGTGTY
KISQEKYNDIKKKEGVDSDSEFKFTLYKNDLLLVKDTETKEQQLFRFLSRTMPKQKHYVELKPYDKQ
KFEGGEALIKVLGNVANSGQCKKGLGKSNISIYKVRTDVLGNQHIIKNEGDKPKLDFKRPAATKKAG
QAKKKK
U6-St_tracrRNA(7-97):
GAGGGCCTATTTCCCATGATTCCTTCATATTTGCATATACGATACAAGGCTGTTAGAGAGATAAT
TGGAATTAATTTGACTGTAAACACAAAGATATTAGTACAAAATACGTGACGTAGAAAGTAATAA
TTTCTTGGGTAGTTTGCAGTTTTAAAATTATGTTTTAAAATGGACTATCATATGCTTACCGTAACT
TGAAAGTATTTCGATTTCTTGGCTTTATATATCTTGTGGAAAGGACGAAACACCGTTACTTAAAT
CTTGCAGAAGCTACAAAGATAAGGCTTCATGCCGAAATCAACACCCTGTCATTTTATGGCAGGG
TGTTTTCGTTATTTAA

[0589] The invention is further described by the following numbered paragraphs:

[0590] 1. An inducible method of altering expression of a genomic locus of interest in a cell comprising:

[0591] (a) contacting the genomic locus with a non-naturally occurring or engineered composition comprising a deoxyribonucleic acid (DNA) binding polypeptide comprising:
[0592] (i) a DNA binding domain comprising at least five or more Transcription activator-like effector (TALE) monomers and at least one or more half-monomers specifically ordered to target the genomic locus of interest or
[0593] at least one or more effector domains
[0594] linked to an energy sensitive protein or fragment thereof, wherein the energy sensitive protein or fragment thereof undergoes a conformational change upon induction by an energy source allowing it to bind an interacting partner, and/or
[0595] (ii) a DNA binding domain comprising at least one or more TALE monomers or half-monomers specifically ordered to target the genomic locus of interest or
[0596] at least one or more effector domains
[0597] linked to the interacting partner, wherein the energy sensitive protein or fragment thereof binds to the interacting partner upon induction by the energy source;

[0598] (b) applying the energy source; and

[0599] (c) determining that the expression of the genomic locus is altered.

[0600] 2. The method according to paragraph 1, wherein the at least one or more effector domains is selected from the group consisting of: transposase domain, integrase domain, recombinase domain, resolvase domain, invertase domain, protease domain, DNA methyltransferase domain, DNA demethylase domain, histone acetylase domain, histone deacetylases domain, nuclease domain, repressor domain, activator domain, nuclear-localization signal domains, transcription-protein recruiting domain, cellular uptake activity associated domain, nucleic acid binding domain and antibody presentation domain.

[0601] 3. The method according to paragraph 2, wherein the at least one or more effector domains is a nuclease domain or a recombinase domain.

[0602] 4. The method according to paragraph 3, wherein the nuclease domain is a non-specific FokI endonuclease catalytic domain.

[0603] 5. The method according to any one of paragraphs 1-4, wherein the energy sensitive protein is Cryptochrome-2 (CRY2).

[0604] 6. The method according to any one of paragraphs 1-5, wherein the interacting partner is Cryptochrome-interacting basic helix-loop-helix (CIB1).

[0605] 7. The method according to any of paragraphs 1-6, wherein the energy source is selected from the group consisting of: electromagnetic radiation, sound energy or thermal energy.

[0606] 8. The method according to paragraph 7, wherein the electromagnetic radiation is a component of visible light.

[0607] 9. The method according to paragraph 8, wherein the component of visible light has a wavelength in the range of 450 nm-500 nm.

[0608] 10. The method according to paragraph 8, wherein the component of visible light is blue light.

[0609] 11. The method according to paragraph 1, wherein the applying the energy source comprises stimulation with blue light at an intensity of at least 6.2 mW/cm².

[0610] 12. The method according to any one of paragraphs 1-11, wherein the DNA binding domain comprises (X₁₋₁₁-X₁₂X₁₃-X_{14-33 or 34 or 35})_{z},

[0611] wherein X₁₋₁₁ is a chain of 11 contiguous amino acids,

[0612] wherein X₁₂X₁₃ is a repeat variable diresidue (RVD),

[0613] wherein X_{14-33 or 34 or 35} is a chain of 21, 22 or 23 contiguous amino acids,

[0614] wherein z is at least 5 to 40, and

[0615] wherein at least one RVD is selected from the group consisting of NI, HD, NG, NN, KN, RN, NH, NQ, SS, SN, NK, KH, RH, HH, HI, KI, RI, SI, KG, HG, RG, SD, ND, KD, RD, YG, HN, NV, NS, HA, S*, N*, KA, H*, RA, NA, and NC, wherein (*) means that the amino acid at X₁₃ is absent.

[0616] 13. The method according to paragraph 12, wherein z is at least 10 to 26.

[0617] 14. The method according to paragraph 12, wherein at least one of X₁₋₁₁ is a sequence of 12 contiguous amino acids set forth as amino acids 1-11 in a sequence (X₁₋₁₁-X₁₄₋₃₄ or X₁₋₁₁-X₁₄₋₃₅) of FIG. 9 or

[0618] at least one of X₁₄₋₃₄ or X₁₄₋₃₅ is a sequence of 21 or 22 contiguous amino acids set forth as amino acids 12-32 or 12-33 in a sequence (X₁₋₁₁-X₁₄₋₃₄ or X₁₋₁₁-X₁₄₋₃₅) of FIG. 9.

[0619] 15. The method according to paragraph 12, wherein the at least one RVD is selected from the group consisting of (a) HH, KH, NH, NK, NQ, RH, RN, SS for recognition of guanine (G); (b) SI for recognition of adenine (A); (c) HG, KG, RG for recognition of thymine (T); (d) RD, SD for recognition of cytosine (C); (e) NV for recognition of A or G; and (f) H*, HA, KA, N*, NA, NC, NS, RA, S* for recognition of A or T or G or C, wherein (*) means that the amino acid at X₁₃ is absent.

[0620] 16. The method according to paragraph 15, wherein
[0621] the RVD for the recognition of G is RN, NH, RH or KH; or
[0622] the RVD for the recognition of A is SI; or
[0623] the RVD for the recognition of T is KG or RG; and
[0624] the RVD for the recognition of C is SD or RD.

[0625] 17. The method according to paragraph 12, wherein at least one of the following is present
[0626] [LTLD](SEQ ID NO: 1) or [LTLA](SEQ ID NO: 2) or [LTQV](SEQ ID NO: 3) at X₁₋₄, or
[0627] [EQHG](SEQ ID NO: 4) or [RDHG](SEQ ID NO: 5) at positions X₃₀₋₃₃ or X₃₁₋₃₄ or X₃₂₋₃₅.

[0628] 18. The method according to any one of paragraphs 1-17, wherein
[0629] the N-terminal capping region or fragment thereof comprises 147 contiguous amino acids of a wild type N-terminal capping region, or
[0630] the C-terminal capping region or fragment thereof comprises 68 contiguous amino acids of a wild type C-terminal capping region, or
[0631] the N-terminal capping region or fragment thereof comprises 136 contiguous amino acids of a wild type N-terminal capping region and the C-terminal capping region or fragment thereof comprises 183 contiguous amino acids of a wild type C-terminal capping region.

[0632] 19. The method according to any one of paragraphs 1-18, wherein the genomic locus of interest is associated with a gene that encodes for a differentiation factor, a transcription factor, a neurotransmitter transporter, a neurotransmitter synthase, a synaptic protein, a plasticity protein, a presynaptic active zone protein, a post synaptic density protein, a neurotransmitter receptor, an epigenetic modifier, a neural fate specification factor, an axon guidance molecule, an ion channel, a CpG binding protein, a ubiquitination protein, a hormone, a homeobox protein, a growth factor, an oncogenes or a proto-oncogene.

[0633] 20. An inducible method of repressing expression of a genomic locus of interest in a cell comprising:

[0634] (a) contacting the genomic locus with a non-naturally occurring or engineered composition comprising a DNA binding polypeptide comprising:
[0635] (i) a DNA binding domain comprising at least five or more Transcription activator-like effector (TALE) monomers and at least one or more half-monomers specifically ordered to target the genomic locus of interest or
[0636] at least one or more effector domains
[0637] linked to an energy sensitive protein or fragment thereof, wherein the energy sensitive protein or fragment thereof undergoes a conformational change upon induction by an energy source allowing it to bind an interacting partner, and/or
[0638] (ii) a DNA binding domain comprising at least one or more TALE monomers or half-monomers specifically ordered to target the genomic locus of interest or
[0639] at least one or more effector domains
[0640] linked to the interacting partner, wherein the energy sensitive protein or fragment thereof binds to the interacting partner upon induction by the energy source;

[0641] (b) applying the energy source; and

[0642] (c) determining that the expression of the genomic locus is repressed.

[0643] 21. The method according to paragraph 20, wherein the polypeptide includes at least one SID repressor domain.

[0644] 22. The method according to paragraph 21, wherein the polypeptide includes at least four SID repressor domains.

[0645] 23. The method according to paragraph 21, wherein the polypeptide includes a SID4X repressor domain.

[0646] 24. The method according to paragraph 20, wherein the polypeptide includes a KRAB repressor domain.

[0647] 25. The method according to any one of paragraphs 20-24, wherein the energy sensitive protein is Cryptochrome-2 (CRY2).

[0648] 26. The method according to any one of paragraphs 20-25, wherein the interacting partner is Cryptochrome-interacting basic helix-loop-helix (CIB1).

[0649] 27. The method according to any one of paragraphs 20-26, wherein the energy source is selected from the group consisting of: electromagnetic radiation, sound energy or thermal energy.

[0650] 28. The method according to paragraph 20, wherein the electromagnetic radiation is a component of visible light.

[0651] 29. The method according to paragraph 28, wherein the component of visible light has a wavelength in the range of 450 nm-500 nm.

[0652] 30. The method according to paragraph 28, wherein the component of visible light is blue light.

[0653] 31. The method according to paragraph 20, wherein the applying the energy source comprises stimulation with blue light at an intensity of at least 6.2 mW/cm².

[0654] 32. The method according to paragraph 20-31, wherein the DNA binding domain comprises (X₁₋₁₁-X₁₂X₁₃-X_{14-33 or 34 or 35})_{z},

[0655] wherein X₁₋₁₁ is a chain of 11 contiguous amino acids,

[0656] wherein X₁₂X₁₃ is a repeat variable diresidue (RVD),

[0657] wherein X_{14-33 or 34 or 35} is a chain of 21, 22 or 23 contiguous amino acids,

[0658] wherein z is at least 5 to 40, and

[0659] wherein at least one RVD is selected from the group consisting of NI, HD, NG, NN, KN, RN, NH, NQ, SS, SN, NK, KH, RH, HH, HI, KI, RI, SI, KG, HG, RG, SD, ND, KD, RD. YG, HN, NV, NS, HA, S*, N*, KA, H*, RA, NA, and NC, wherein (*) means that the amino acid at X₁₃ is absent.

[0660] 33. The method according to paragraph 32, wherein z is at least 10 to 26.

[0661] 34. The method according to paragraph 32, wherein at least one of X₁₋₁₁ is a sequence of 11 contiguous amino acids set forth as amino acids 1-11 in a sequence (X₁₋₁₁-X₁₄₋₃₄ or X₁₋₁₁₁-X₁₄₋₃₅) of FIG. 9 or

[0662] at least one of X₁₄₋₃₄ or X₁₄₋₃₅ is a sequence of 21 or 22 contiguous amino acids set forth as amino acids 12-32 or 12-33 in a sequence (X₁₋₁₁-X₁₄₋₃₄ or X₁₋₁₁-X₁₄₋₃₅) of FIG. 9.

[0663] 35. The method according to any one of paragraphs 20-34, wherein
[0664] the N-terminal capping region or fragment thereof comprises 147 contiguous amino acids of a wild type N-terminal capping region, or
[0665] the C-terminal capping region or fragment thereof comprises 68 contiguous amino acids of a wild type C-terminal capping region, or
[0666] the N-terminal capping region or fragment thereof comprises 136 contiguous amino acids of a wild type N-terminal capping region and the C-terminal capping region or fragment thereof comprises 183 contiguous amino acids of a wild type C-terminal capping region.

[0667] 36. The method according to any one of paragraphs 20-35, wherein the genomic locus of interest is the genomic locus associated with a gene that encodes for a differentiation factor or a component of an ion channel.

[0668] 37. The method according to paragraph 36, wherein the differentiation factor is SRY-box-2 (SOX2) and is encoded by the gene SOX2.

[0669] 38. The method according to paragraph 36, wherein the differentiation factor is p11 and is encoded by the gene p11.

[0670] 39. The method according to paragraph 36, wherein the component of the ion channel is CACNA1C and is encoded by the gene CACNA1C.

[0671] 40. An inducible method of activating expression of a genomic locus of interest in a cell comprising:

[0672] (a) contacting the genomic locus with a non-naturally occurring or engineered composition comprising a DNA binding polypeptide comprising:
[0673] (i) a DNA binding domain comprising at least five or more TALE monomers and at least one or more half-monomers specifically ordered to target the genomic locus of interest or
[0674] at least one or more activator domains
[0675] linked to an energy sensitive protein or fragment thereof, wherein the energy sensitive protein or fragment thereof undergoes a conformational change upon induction by an energy source allowing it to bind an interacting partner, and
[0676] (ii) a DNA binding domain comprising at least one or more TALE monomers or half-monomers specifically ordered to target the genomic locus of interest or
[0677] at least one or more activator domains
[0678] linked to the interacting partner, wherein the energy sensitive protein or fragment thereof binds to the interacting partner upon induction by the energy source;

[0679] (b) applying the energy source; and

[0680] (c) determining that the expression of the genomic locus is activated.

[0681] 41. The method according to paragraph 40, wherein the polypeptide includes at least one VP16 or VP64 activator domain.

[0682] 42. The method according to paragraph 40, wherein the polypeptide includes at least one p65 activator domain.

[0683] 43. The method according to any one of paragraphs 40-42, wherein the energy sensitive protein is CRY2.

[0684] 44. The method according to any one of paragraph 40-43, wherein the interacting partner is CIB1.

[0685] 45. The method according to paragraph 40, wherein the energy source is selected from the group consisting of: electromagnetic radiation, sound energy or thermal energy.

[0686] 46. The method according to paragraph 45, wherein the electromagnetic radiation is a component of visible light.

[0687] 47. The method according to paragraph 46, wherein the component of visible light has a wavelength in the range of 450 nm-500 nm.

[0688] 48. The method according to paragraph 46, wherein the component of visible light is blue light.

[0689] 49. The method according to paragraph 40, wherein the applying the energy source comprises stimulation with blue light at an intensity of at least 6.2 mW/cm².

[0690] 50. The method according to any one of paragraphs 40-49, wherein the DNA binding domain comprises (X₁₋₁₁-X₁₂X₁₃-X_{14-33 or 34 or 35})_{z},

[0691] wherein X₁₋₁₁ is a chain of 11 contiguous amino acids,

[0692] wherein X₁₂X₁₃ is a repeat variable diresidue (RVD),

[0693] wherein X_{14-33 or 34 or 35} is a chain of 21, 22 or 23 contiguous amino acids,

[0694] wherein z is at least 5 to 40, and

[0695] wherein at least one RVD is selected from the group consisting of NI, HD, NG, NN, KN, RN, NH, NQ, SS, SN, NK, KH, RH, HH, HI, KI, RI, SI, KG, HG, RG, SD, ND, KD, RD, YG, HN, NV, NS, HA, S*, N*, KA, H*, RA, NA, and NC, wherein (*) means that the amino acid at X₁₃ is absent.

[0696] 51. The method according to paragraph 50, wherein z is at least 10 to 26.

[0697] 52. The method according to paragraph 50, wherein

[0698] at least one of X₁₋₁₁ is a sequence of 11 contiguous amino acids set forth as amino acids 1-11 in a sequence (X₁₋₁₁-X₁₄₋₃₄ or X₁₋₁₁-X₁₄₋₃₅) of FIG. 9 or

[0699] at least one of X₁₄₋₃₄ or X₁₄₋₃₅ is a sequence of 21 or 22 contiguous amino acids set forth as amino acids 12-32 or 12-33 in a sequence (X₁₋₁₁-X₁₄₋₃₄ or X₁₋₁₁-X₁₄₋₃₅) of FIG. 9.

[0700] 53. The method according to any one of paragraphs 40-52, wherein
[0701] the N-terminal capping region or fragment thereof comprises 147 contiguous amino acids of a wild type N-terminal capping region, or
[0702] the C-terminal capping region or fragment thereof comprises 68 contiguous amino acids of a wild type C-terminal capping region, or
[0703] the N-terminal capping region or fragment thereof comprises 136 contiguous amino acids of a wild type N-terminal capping region and the C-terminal capping region or fragment thereof comprises 183 contiguous amino acids of a wild type C-terminal capping region.

[0704] 54. The method according to any one of paragraphs 40-53, wherein the genomic locus of interest is the genomic locus associated with a gene that encodes for a differentiation factor, an epigenetic modulator or a component of an ion channel.

[0705] 55. The method according to paragraph 54, wherein the differentiation factor is Neurogenin-2 and is encoded by the gene NEUROG2.

[0706] 56. The method according to paragraph 54, wherein the differentiation factor is Kreuppel-like factor 4 and is encoded by the gene KLF-4.

[0707] 57. The method according to paragraph 54, wherein the epigenetic modulator is Tet methylcytosine dioxygenase 1 and is encoded by the gene tet-1.

[0708] 58. The method according to paragraph 54, wherein the component of the ion channel is CACNA1C and is encoded by the gene CACNA1C.

[0709] 59. A non-naturally occurring or engineered composition for inducibly altering expression of a genomic locus in a cell wherein the composition comprises a DNA binding polypeptide comprising:
[0710] (i) a DNA binding domain comprising at least one or more TALE monomers or half-monomers or
[0711] at least one or more effector domains
[0712] linked to an energy sensitive protein or fragment thereof, wherein the energy sensitive protein or fragment thereof undergoes a conformational change upon induction by an energy source allowing it to bind an interacting partner, and/or
[0713] (ii) a DNA binding domain comprising at least one or more TALE monomers or half-monomers or
[0714] at least one or more effector domains
[0715] linked to the interacting partner, wherein the energy sensitive protein or fragment thereof binds to the interacting partner upon induction by the energy source;

[0716] wherein the polypeptide is encoded by and translated from a codon optimized nucleic acid molecule so that the polypeptide preferentially binds to DNA of the genomic locus, and

[0717] wherein the polypeptide alters the expression of the genomic locus upon application of the energy source.

[0718] 60. The composition according to paragraph 59, wherein the at least one or more effector domains is selected from the group consisting of: transposase domain, integrase domain, recombinase domain, resolvase domain, invertase domain, protease domain. DNA methyltransferase domain, DNA demethylase domain, histone acetylase domain, histone deacetylases domain, nuclease domain, repressor domain, activator domain, nuclear-localization signal domains, transcription-protein recruiting domain, cellular uptake activity associated domain, nucleic acid binding domain and antibody presentation domain.

[0719] 61. The composition according to paragraph 59, wherein the at least one or more effector domains is a nuclease domain or a recombinase domain.

[0720] 62. The composition according to paragraph 61, wherein the nuclease domain is a non-specific FokI endonuclease catalytic domain.

[0721] 63. The method according to any one of paragraphs 59-62, wherein the energy sensitive protein is Cryptochrome-2 (CRY2).

[0722] 64. The composition according to any one of paragraphs 59-63, wherein the interacting partner is Cryptochrome-interacting basic helix-loop-helix (CIB1).

[0723] 65. The composition according to any one of paragraphs 59-64, wherein the energy source is selected from the group consisting of: electromagnetic radiation, sound energy or thermal energy.

[0724] 66. The composition according to paragraph 65, wherein the electromagnetic radiation is a component of visible light.

[0725] 67. The composition according to paragraph 66, wherein the component of visible light has a wavelength in the range of 450 nm-500 nm.

[0726] 68. The composition according to paragraph 66, wherein the component of visible light is blue light.

[0727] 69. The composition according to paragraph 59, wherein the applying the energy source comprises stimulation with blue light at an intensity of at least 6.2 mW/cm².

[0728] 70. The composition according to any one of paragraphs 59-69, wherein the DNA binding domain comprises (X₁₋₁₁-X₁₂X₁₃-X_{14-33 or 34 or 35})_{z},

[0729] wherein X₁₋₁₁ is a chain of 11 contiguous amino acids,

[0730] wherein X₁₂X₁₃ is a repeat variable diresidue (RVD),

[0731] wherein X_{14-33 or 34 or 35} is a chain of 21, 22 or 23 contiguous amino acids,

[0732] wherein z is at least 5 to 40, and

[0733] wherein at least one RVD is selected from the group consisting of NI, HD, NG, NN, KN, RN, NH, NQ, SS, SN, NK, KH, RH, HH, HI, KI, RI, SI, KG, HG, RG, SD, ND, KD, RD, YG, HN, NV, NS, HA, S*, N*, KA, H*, RA, NA, and NC, wherein (*) means that the amino acid at X₁₃ is absent.

[0734] 71. The composition according to paragraph 70, wherein z is at least 10 to 26.

[0735] 72. The composition according to paragraph 70, wherein

[0736] at least one of X₁₋₁₁ is a sequence of 12 contiguous amino acids set forth as amino acids 1-11 in a sequence (X₁₋₁₁-X₁₄₋₃₄ or X₁₋₁₁-X₁₄₋₃₅) of FIG. 9 or

[0737] at least one of X₁₄₋₃₄ or X₁₄₋₃₅ is a sequence of 21 or 22 contiguous amino acids set forth as amino acids 12-32 or 12-33 in a sequence (X₁₋₁₁-X₁₄₋₃₄ or X₁₋₁₁-X₁₄₋₃₅) of FIG. 9.

[0738] 73. The composition according to paragraph 70, wherein the at least one RVD is selected from the group consisting of (a) HH, KH, NH, NK, NQ, RH, RN, SS for recognition of guanine (G); (b) SI for recognition of adenine (A); (c) HG, KG, RG for recognition of thymine (T); (d) RD, SD for recognition of cytosine (C); (e) NV for recognition of A or G; and (f) H*, HA, KA, N*, NA, NC, NS, RA, S* for recognition of A or T or G or C, wherein (*) means that the amino acid at X₁₃ is absent.

[0739] 74. The composition according to paragraph 73, wherein
[0740] the RVD for the recognition of G is RN, NH, RH or KH; or
[0741] the RVD for the recognition of A is SI; or
[0742] the RVD for the recognition of T is KG or RG; and
[0743] the RVD for the recognition of C is SD or RD.

[0744] 75. The composition according to paragraph 70, wherein at least one of the following is present
[0745] [LTLD](SEQ ID NO: 1) or [LTLA](SEQ ID NO: 2) or [LTQV](SEQ ID NO: 3) at X₁₋₄, or
[0746] [EQHG](SEQ ID NO: 4) or [RDHG](SEQ ID NO: 5) at positions X₃₀₋₃₃ or X₃₁₋₃₄ or X₃₂₋₃₅.

[0747] 76. The composition according to any one of paragraphs 59-75, wherein
[0748] the N-terminal capping region or fragment thereof comprises 147 contiguous amino acids of a wild type N-terminal capping region, or
[0749] the C-terminal capping region or fragment thereof comprises 68 contiguous amino acids of a wild type C-terminal capping region, or
[0750] the N-terminal capping region or fragment thereof comprises 136 contiguous amino acids of a wild type N-terminal capping region and the C-terminal capping region or fragment thereof comprises 183 contiguous amino acids of a wild type C-terminal capping region.

[0751] 77. The composition according to any one of paragraphs 59-76, wherein the genomic locus of interest is associated with a gene that encodes for a differentiation factor, a transcription factor, a neurotransmitter transporter, a neurotransmitter synthase, a synaptic protein, a plasticity protein, a presynaptic active zone protein, a post synaptic density protein, a neurotransmitter receptor, an epigenetic modifier, a neural fate specification factor, an axon guidance molecule, an ion channel, a CpG binding protein, a ubiquitination protein, a hormone, a homeobox protein, a growth factor, an oncogenes or a proto-oncogene.

[0752] 78. A non-naturally occurring or engineered composition for inducibly repressing expression of a genomic locus in a cell wherein the composition comprises a DNA binding polypeptide comprising:
[0753] (i) a DNA binding domain comprising at least one or more TALE monomers or half-monomers or
[0754] at least one or more repressor domains
[0755] linked to an energy sensitive protein or fragment thereof, wherein the energy sensitive protein or fragment thereof undergoes a conformational change upon induction by an energy source allowing it to bind an interacting partner, and/or
[0756] (ii) a DNA binding domain comprising at least one or more TALE monomers or half-monomers or
[0757] at least one or more repressor domains
[0758] linked to the interacting partner, wherein the energy sensitive protein or fragment thereof binds to the interacting partner upon induction by the energy source;

[0759] wherein the polypeptide is encoded by and expressed from a codon optimized nucleic acid molecule so that the polypeptide preferentially binds to DNA of the genomic locus, and

[0760] wherein the polypeptide represses the expression of the genomic locus upon application of the energy source.

[0761] 79. The composition according to paragraph 78, wherein the polypeptide includes at least one SID repressor domain.

[0762] 80. The composition according to paragraph 79, wherein the polypeptide includes at least four SID repressor domains.

[0763] 81. The composition according to paragraph 78, wherein the polypeptide includes a SID4X repressor domain.

[0764] 82. The composition according to paragraph 78, wherein the polypeptide includes a KRAB repressor domain.

[0765] 83. The composition according to any one of paragraphs 78-82, wherein the energy sensitive protein is Cryptochrome-2 (CRY2).

[0766] 84. The composition according to any one of paragraphs 78-83, wherein the interacting partner is Cryptochrome-interacting basic helix-loop-helix (CIB1).

[0767] 85. The composition according to any one of paragraphs 78-84, wherein the energy source is selected from the group consisting of: electromagnetic radiation, sound energy or thermal energy.

[0768] 86. The composition according to paragraph 78, wherein the electromagnetic radiation is a component of visible light.

[0769] 87. The composition according to paragraph 86, wherein the component of visible light has a wavelength in the range of 450 nm-500 nm.

[0770] 88. The composition according to paragraph 86, wherein the component of visible light is blue light.

[0771] 89. The composition according to paragraph 78, wherein the applying the energy source comprises stimulation with blue light at an intensity of at least 6.2 mW/cm².

[0772] 90. The composition according to any one of paragraphs 78-89, wherein the DNA binding domain comprises (X₁₋₁₁X₁₂X₁₃-X_{14-33 or 34 or 35})_{z},

[0773] wherein X₁₋₁₁ is a chain of 11 contiguous amino acids,

[0774] wherein X₁₂X₁₃ is a repeat variable diresidue (RVD),

[0775] wherein X_{14-33 or 34 or 35} is a chain of 21, 22 or 23 contiguous amino acids,

[0776] wherein z is at least 5 to 40, and

[0777] wherein at least one RVD is selected from the group consisting of NI, HD, NG, NN, KN, RN, NH, NQ, SS, SN, NK, KH, RH, HH, HI, KI, RI, SI, KG, HG, RG, SD, ND, KD, RD, YG, HN, NV, NS, HA, S*, N*, KA, H*, RA, NA, and NC, wherein (*) means that the amino acid at X₁₃ is absent.

[0778] 91. The composition according to paragraph 90, wherein z is at least 10 to 26.

[0779] 92. The composition according to paragraph 90, wherein at least one of X₁₋₁₁ is a sequence of 11 contiguous amino acids set forth as amino acids 1-11 in a sequence (X₁₋₁₁-X₁₄₋₃₄ or X₁₋₁₁-X₁₄₋₃₅) of FIG. 9 or

[0780] at least one of X₁₄₋₃₄ or X₁₄₋₃₅ is a sequence of 21 or 22 contiguous amino acids set forth as amino acids 12-32 or 12-33 in a sequence (X₁₋₁₁-X₁₄₋₃₄ or X₁₋₁₁-X₃₅) of FIG. 9.

[0781] 93. The composition according to any one of paragraphs 78-92, wherein
[0782] the N-terminal capping region or fragment thereof comprises 147 contiguous amino acids of a wild type N-terminal capping region, or
[0783] the C-terminal capping region or fragment thereof comprises 68 contiguous amino acids of a wild type C-terminal capping region, or
[0784] the N-terminal capping region or fragment thereof comprises 136 contiguous amino acids of a wild type N-terminal capping region and the C-terminal capping region or fragment thereof comprises 183 contiguous amino acids of a wild type C-terminal capping region.

[0785] 94. The composition according to any of paragraphs 78-93, wherein the genomic locus of interest is the genomic locus associated with a gene that encodes for a differentiation factor or a component of an ion channel.

[0786] 95. The composition according to paragraph 94, wherein the differentiation factor is SRY-box-2 (SOX2) and is encoded by the gene SOX2.

[0787] 96. The composition according to paragraph 94, wherein the differentiation factor is p11 and is encoded by the gene p11.

[0788] 97. The composition according to paragraph 95, wherein the component of the ion channel is CACNA1C and is encoded by the gene CACNA1C.

[0789] 98. A non-naturally occurring or engineered composition for inducibly activating expression of a genomic locus of interest in a cell wherein the composition comprises a DNA binding polypeptide comprising:
[0790] (i) a DNA binding domain comprising at least five or more Transcription activator-like effector (TALE) monomers and at least one or more half-monomers specifically ordered to target the genomic locus of interest or
[0791] at least one or more effector domains
[0792] linked to an energy sensitive protein or fragment thereof, wherein the energy sensitive protein or fragment thereof undergoes a conformational change upon induction by an energy source allowing it to bind an interacting partner, and/or
[0793] (ii) a DNA binding domain comprising at least one or more TALE monomers or half-monomers specifically ordered to target the genomic locus of interest or
[0794] at least one or more effector domains
[0795] linked to the interacting partner, wherein the energy sensitive protein or fragment thereof binds to the interacting partner upon induction by the energy source;

[0796] wherein the polypeptide is encoded by and expressed from a codon optimized nucleic acid molecule so that the polypeptide preferentially binds to DNA of the genomic locus, and

[0797] wherein the polypeptide activates the expression of the genomic locus upon application of the energy source.

[0798] 99. The composition according to paragraph 98, wherein the polypeptide includes at least one VP16 or VP64 activator domain.

[0799] 100. The composition according to paragraph 98, wherein the polypeptide includes at least one p65 activator domain.

[0800] 101. The composition according to any one of paragraphs 98-100, wherein the energy sensitive protein is CRY2.

[0801] 102. The composition according to any one of paragraphs 98-101, wherein the interacting partner is CIB1.

[0802] 103. The composition according to paragraph 98, wherein the energy source is selected from the group consisting of: electromagnetic radiation, sound energy or thermal energy.

[0803] 104. The composition according to paragraph 103, wherein the electromagnetic radiation is a component of visible light.

[0804] 105. The method according to paragraph 104, wherein the component of visible light has a wavelength in the range of 450 nm-500 nm.

[0805] 106. The method according to paragraph 104, wherein the component of visible light is blue light.

[0806] 107. The method according to paragraph 98, wherein the applying the energy source comprises stimulation with blue light at an intensity of at least 6.2 mW/cm².

[0807] 108. The composition according to any one of paragraphs 98-107, wherein the DNA binding domain comprises (X₁₋₁₁-X₁₂X₁₃-X_{14-33 or 34 or 35})_{z},

[0808] wherein X₁₋₁₁ is a chain of 11 contiguous amino acids,

[0809] wherein X₁₂X₁₃ is a repeat variable diresidue (RVD),

[0810] wherein X_{14-33 or 34 or 35} is a chain of 21, 22 or 23 contiguous amino acids,

[0811] wherein z is at least 5 to 40, and

[0812] wherein at least one RVD is selected from the group consisting of NI, HD, NG, NN, KN, RN, NH, NQ, SS, SN, NK, KH, RH, HH, HI, KI, RI, SI, KG, HG. RG, SD, ND, KD, RD, YG, HN, NV, NS, HA, S*, N*, KA, H*, RA, NA, and NC, wherein (*) means that the amino acid at X₁₃ is absent.

[0813] 109. The composition according to paragraph 108, wherein z is at least 10 to 26.

[0814] 110. The composition according to paragraph 108, wherein

[0815] at least one of X₁₋₁₁ is a sequence of 11 contiguous amino acids set forth as amino acids 1-11 in a sequence (X₁₋₁₁-X₁₄₋₃₄ or X₁₋₁₁-X₁₄₋₃₅) of FIG. 9 or

[0816] at least one of X₁₄₋₃₄ or X₁₄₋₃₅ is a sequence of 21 or 22 contiguous amino acids set forth as amino acids 12-32 or 12-33 in a sequence (X₁₋₁₁-X₁₄₋₃₄ or X₁₋₁₁-X₁₄₋₃₅) of FIG. 9.

[0817] 111. The composition according to any one of paragraphs 98-110, wherein
[0818] the N-terminal capping region or fragment thereof comprises 147 contiguous amino acids of a wild type N-terminal capping region, or
[0819] the C-terminal capping region or fragment thereof comprises 68 contiguous amino acids of a wild type C-terminal capping region, or
[0820] the N-terminal capping region or fragment thereof comprises 136 contiguous amino acids of a wild type N-terminal capping region and the C-terminal capping region or fragment thereof comprises 183 contiguous amino acids of a wild type C-terminal capping region.

[0821] 112. The composition according to any one of paragraphs 98-111, wherein the genomic locus of interest is the genomic locus associated with a gene that encodes for a differentiation factor, an epigenetic modulator, a component of an ion channel or a receptor.

[0822] 113. The composition according to paragraph 112, wherein the differentiation factor is Neurogenin-2 and is encoded by the gene NEUROG2.

[0823] 114. The composition according to paragraph 112, wherein the differentiation factor is Kreuppel-like factor 4 and is encoded by the gene KLF-4.

[0824] 115. The composition according to paragraph 112, wherein the epigenetic modulator is Tet methylcytosine dioxygenase 1 and is encoded by the gene tet-1.

[0825] 116. The composition according to paragraph 112, wherein the component of the ion channel is CACNA1C and is encoded by the gene CACNA1C.

[0826] 117. The composition according to paragraph 112, wherein the receptor is metabotropic glutamate receptor and is encoded by the gene mGlur2.

[0827] 118. The composition according to any one of paragraphs 98-117, wherein the expression is chemically inducible.

[0828] 119. The composition according to paragraph 118, wherein the chemically inducible expression system is an estrogen based (ER) system inducible by 4-hydroxytamoxifen (4OHT).

[0829] 120. The composition according to paragraph 119 wherein the composition further comprises a nuclear exporting signal (NES).

[0830] 121. The composition of paragraph 120, wherein the NES has the sequence of LDLASLIL (SEQ ID NO: 6).

[0831] 122. A nucleic acid encoding the composition according to any one of paragraphs 98-121.

[0832] 123. The nucleic acid of paragraph 122 wherein the nucleic acid comprises a promoter.

[0833] 124. The nucleic acid according to paragraph 123, wherein the promoter is a human Synapsin I promoter (hSyn).

[0834] 125. The nucleic acid according to any one of paragraphs 122-124, wherein the nucleic acid is packaged into an adeno associated viral vector (AAV).

[0835] 126. An inducible method of altering expression of a genomic locus of interest comprising:

[0836] (a) contacting the genomic locus with a non-naturally occurring or engineered composition comprising a DNA binding polypeptide comprising:
[0837] (i) a DNA binding domain comprising at least five or more Transcription activator-like effector (TALE) monomers and at least one or more half-monomers specifically ordered to target the genomic locus of interest or
[0838] at least one or more effector domains
[0839] linked to an energy sensitive protein or fragment thereof, wherein the energy sensitive protein or fragment thereof undergoes a conformational change upon induction by an energy source allowing it to bind an interacting partner, and/or
[0840] (ii) a DNA binding domain comprising at least one or more TALE monomers or half-monomers specifically ordered to target the genomic locus of interest or
[0841] at least one or more effector domains
[0842] linked to the interacting partner, wherein the energy sensitive protein or fragment thereof binds to the interacting partner upon induction by the energy source;

[0843] (b) applying the energy source; and

[0844] (c) determining that the expression of the genomic locus is altered.

[0845] 127. A non-naturally occurring or engineered composition for inducibly altering expression of a genomic locus wherein the composition comprises a DNA binding polypeptide comprising:
[0846] (i) a DNA binding domain comprising at least five or more Transcription activator-like effector (TALE) monomers and at least one or more half-monomers specifically ordered to target the genomic locus of interest or
[0847] at least one or more effector domains
[0848] linked to an energy sensitive protein or fragment thereof, wherein the energy sensitive protein or fragment thereof undergoes a conformational change upon induction by an energy source allowing it to bind an interacting partner, and/or
[0849] (ii) a DNA binding domain comprising at least one or more TALE monomers or half-monomers specifically ordered to target the genomic locus of interest or
[0850] at least one or more effector domains
[0851] linked to the interacting partner, wherein the energy sensitive protein or fragment thereof binds to the interacting partner upon induction by the energy source;

[0852] wherein the polypeptide preferentially binds to DNA of the genomic locus, and

[0853] wherein the polypeptide alters the expression of the genomic locus upon application of the energy source.

[0854] 128. An inducible method for perturbing expression of a genomic locus of interest in a cell comprising:
[0855] (a) contacting the genomic locus with a non-naturally occurring or engineered composition comprising a deoxyribonucleic acid (DNA) binding polypeptide;
[0856] (b) applying an inducer source; and
[0857] (c) determining that perturbing expression of the genomic locus has occurred.

[0858] 129. The method of paragraph 128, wherein perturbing expression is altering expression (up or down), altering the expression result (such as with nuclease) or eliminating expression shifting, for example, altering expression to dependent option.

[0859] 130. The method of paragraph 128 or 129, wherein the inducer source is an energy source (such as wave or heat) or a small molecule.

[0860] 131. The method of any one of paragraphs 126-130, wherein the DNA binding polypeptide comprises:

[0861] (i) a DNA binding domain comprising at least five or more Transcription activator-like effector (TALE) monomers and at least one or more half-monomers specifically ordered to target the genomic locus of interest or at least one or more effector domains linked to an energy sensitive protein or fragment thereof, wherein the energy sensitive protein or fragment thereof undergoes a conformational change upon induction by an energy source allowing it to bind an interacting partner, and/or

[0862] (ii) a DNA binding domain comprising at least one or more TALE monomers or half-monomers specifically ordered to target the genomic locus of interest or at least one or more effector domains linked to the interacting partner, wherein the energy sensitive protein or fragment thereof binds to the interacting partner upon induction by the energy source.

[0863] 132. An inducible method for perturbing expression of a genomic locus of interest in a cell comprising:

[0864] (a) contacting the genomic locus with a vector system comprising one or more vectors comprising

[0865] I. a first regulatory element operably linked to a CRISPR/Cas system chimeric RNA (chiRNA) polynucleotide sequence, wherein the polynucleotide sequence comprises

[0866] (a) a guide sequence capable of hybridizing to a target sequence in a eukaryotic cell,

[0867] (b) a tracr mate sequence, and

[0868] (c) a tracr sequence, and

[0869] II. a second regulatory inducible element operably linked to an enzyme-coding sequence encoding a CRISPR enzyme comprising at least one or more nuclear localization sequences,

[0870] wherein (a), (b) and (c) are arranged in a 5′ to 3′orientation,

[0871] wherein components I and II are located on the same or different vectors of the system,

[0872] wherein when transcribed, the tracr mate sequence hybridizes to the tracr sequence and the guide sequence directs sequence-specific binding of a CRISPR complex to the target sequence, and

[0873] wherein the CRISPR complex comprises the CRISPR enzyme complexed with (1) the guide sequence that is hybridized to the target sequence, and (2) the tracr mate sequence that is hybridized to the tracr sequence,

[0874] wherein the enzyme coding sequence encoding the CRISPR enzyme further encodes a heterologous functional domain;

[0875] (b) applying an inducer source; and

[0876] (c) determining that perturbing expression of the genomic locus has occurred.

[0877] 133. The method of paragraph 132, wherein perturbing expression is altering expression (up or down), altering the expression result (such as with nuclease) or eliminating expression shifting, for example, altering expression to dependent option.

[0878] 134. The method of paragraph 132 or 133, wherein the inducer source is a chemical.

[0879] 135. The method of any one of paragraphs 132 to 134, wherein the vector is a lentivirus.

[0880] 136. The method of any one of paragraphs 132 to 135, wherein the second regulatory inducible element comprises a tetracycline-dependent regulatory system.

[0881] 137. The method of any one of paragraphs 132 to 135, wherein the second regulatory inducible element comprises a cumate gene switch system.

[0882] 138. The composition, nucleic acid or method of any one of paragraphs 1-137, wherein the cell is an a prokaryotic cell or a eukaryotic cell.

[0883] 139. The composition, nucleic acid or method of paragraph 138, wherein the eukaryotic cell is an animal cell.

[0884] 140. The composition, nucleic acid or method of paragraph 139, wherein the animal cell is a mammalian cell.

[0885] 201. A non-naturally occurring or engineered TALE or CRISPR-Cas system, comprising at least one switch wherein the activity of said TALE or CRISPR-Cas system is controlled by contact with at least one inducer energy source as to the switch.

[0886] 202. The system according to paragraph 201 wherein the control as to the at least one switch or the activity of said TALE or CRISPR-Cas system is activated, enhanced, terminated or repressed.

[0887] 203. The system according to any of the preceding paragraphs wherein contact with the at least one inducer energy source results in a first effect and a second effect.

[0888] 204. The system according to paragraph 203 wherein the first effect is one or more of nuclear import, nuclear export, recruitment of a secondary component (such as an effector molecule), conformational change (of protein, DNA or RNA), cleavage, release of cargo (such as a caged molecule or a co-factor), association or dissociation.

[0889] 205. The system according to paragraph 203 wherein the second effect is one or more of activation, enhancement, termination or repression of the control as to the at least one switch or the activity of said TALE or CRISPR-Cas system.

[0890] 206. The system according to any of paragraphs 203-205 wherein the first effect and the second effect occur in a cascade.

[0891] 207. The system according to any of the preceding paragraphs wherein said TALE or CRISPR-Cas system further comprises at least one nuclear localization signal (NLS), nuclear export signal (NES), functional domain, flexible linker, mutation, deletion, alteration or truncation.

[0892] 208. The system according to paragraph 207 wherein one or more of the NLS, the NES or the functional domain is conditionally activated or inactivated.

[0893] 209. The system according to paragraph 207 wherein the mutation is one or more of a mutation in a transcription factor homology region, a mutation in a DNA binding domain (such as mutating basic residues of a basic helix loop helix), a mutation in an endogenous NLS or a mutation in an endogenous NES.

[0894] 210. The system according to any of the preceding paragraphs wherein the inducer energy source is heat, ultrasound, electromagnetic energy or chemical.

[0895] 211. The system according to any of the preceding paragraphs wherein the inducer energy source is an antibiotic, a small molecule, a hormone, a hormone derivative, a steroid or a steroid derivative.

[0896] 212. The system according to any of the preceding paragraphs wherein the inducer energy source is abscisic acid (ABA), doxycycline (DOX), cumate, rapamycin, 4-hydroxytamoxifen (4OHT), estrogen or ecdysone.

[0897] 213. The system according to any one of the preceding paragraphs wherein the at least one switch is selected from the group consisting of antibiotic based inducible systems, electromagnetic energy based inducible systems, small molecule based inducible systems, nuclear receptor based inducible systems and hormone based inducible systems.

[0898] 214. The system according to any one of the preceding paragraphs wherein the at least one switch is selected from the group consisting of tetracycline (Tet)/DOX inducible systems, light inducible systems, ABA inducible systems, cumate repressor/operator systems, 4OHT/estrogen inducible systems, ecdysone-based inducible systems and FKBP12/FRAP (FKBP12-rapamycin complex) inducible systems.

[0899] 215. The system according to paragraph 210 wherein the inducer energy source is electromagnetic energy.

[0900] 216. The system according to paragraph 215 wherein the electromagnetic energy is a component of visible light.

[0901] 217. The system according to paragraph 216 wherein the component of visible light has a wavelength in the range of 450 nm-700 nm.

[0902] 218. The system according to paragraph 217 wherein the component of visible light has a wavelength in the range of 450 nm-500 nm.

[0903] 219. The system according to paragraph 218 wherein the component of visible light is blue light.

[0904] 220. The system according to paragraph 219 wherein the blue light has an intensity of at least 0.2 mW/cm².

[0905] 221. The system according to paragraph 219 wherein the blue light has an intensity of at least 4 mW/cm².

[0906] 222. The system according to paragraph 217 wherein the component of visible light has a wavelength in the range of 620-700 nm.

[0907] 223. The system according to paragraph 222 wherein the component of visible light is red light.

[0908] 224. The system according to paragraph 207 wherein the at least one functional domain is selected from the group consisting of: transposase domain, integrase domain, recombinase domain, resolvase domain, invertase domain, protease domain, DNA methyltransferase domain, DNA hydroxylmethylase domain, DNA demethylase domain, histone acetylase domain, histone deacetylases domain, nuclease domain, repressor domain, activator domain, nuclear-localization signal domains, transcription-regulatory protein (or transcription complex recruiting) domain, cellular uptake activity associated domain, nucleic acid binding domain, antibody presentation domain, histone modifying enzymes, recruiter of histone modifying enzymes; inhibitor of histone modifying enzymes, histone methyltransferase, histone demethylase, histone kinase, histone phosphatase, histone ribosylase, histone deribosylase, histone ubiquitinase, histone deubiquitinase, histone biotinase and histone tail protease.

[0909] 225. Use of the system in any of the preceding paragraphs for perturbing a genomic or epigenomic locus of interest.

[0910] 226. Use of the system in any of paragraphs 201-224 for the preparation of a pharmaceutical compound.

[0911] 227. A method of controlling a non-naturally occurring or engineered TALE or CRISPR-Cas system, comprising providing said TALE or CRISPR-Cas system comprising at least one switch wherein the activity of said TALE or CRISPR-Cas system is controlled by contact with at least one inducer energy source as to the switch.

[0912] 228. The method according to paragraph 227 wherein the control as to the at least one switch or the activity of said TALE or CRISPR-Cas system is activated, enhanced, terminated or repressed.

[0913] 229. The method according to paragraphs 227 or 228 wherein contact with the at least one inducer energy source results in a first effect and a second effect.

[0914] 230. The method according to paragraph 229 wherein the first effect is one or more of nuclear import, nuclear export, recruitment of a secondary component (such as an effector molecule), conformational change (of protein, DNA or RNA), cleavage, release of cargo (such as a caged molecule or a co-factor), association or dissociation.

[0915] 231. The method according to paragraph 229 wherein the second effect is one or more of activation, enhancement, termination or repression of the control as to the at least one switch or the activity of said TALE or CRISPR-Cas system.

[0916] 232. The method according to any of paragraphs 229-231 wherein the first effect and the second effect occur in a cascade.

[0917] 233. The method according to any of paragraphs 227-232 wherein said TALE or CRISPR-Cas system further comprises at least one nuclear localization signal (NLS), nuclear export signal (NES), functional domain, flexible linker, mutation, deletion, alteration or truncation.

[0918] 234. The method according to paragraph 233 wherein one or more of the NLS, the NES or the functional domain is conditionally activated or inactivated.

[0919] 235. The method according to paragraph 233 wherein the mutation is one or more of a mutation in a transcription factor homology region, a mutation is a DNA binding domain (such as mutating basic residues of a basic helix loop helix), a mutation in an endogenous NLS or a mutation in an endogenous NES.

[0920] 236. The method according to any of paragraphs 227-235 wherein the inducer energy source is heat, ultrasound, electromagnetic energy or chemical.

[0921] 237. The method according to any of paragraphs 227-236 wherein the inducer energy source is an antibiotic, a small molecule, a hormone, a hormone derivative, a steroid or a steroid derivative.

[0922] 238. The method according to any of paragraphs 227-237 wherein the inducer energy source is abscisic acid (ABA), doxycycline (DOX), cumate, rapamycin, 4-hydroxytamoxifen (4OHT), estrogen or ecdysone.

[0923] 239. The method according to any of paragraphs 227-238 wherein the at least one switch is selected from the group consisting of antibiotic based inducible systems, electromagnetic energy based inducible systems, small molecule based inducible systems, nuclear receptor based inducible systems and hormone based inducible systems.

[0924] 240. The method according to any of paragraphs 227-239 wherein the at least one switch is selected from the group consisting of tetracycline (Tet)/DOX inducible systems, light inducible systems, ABA inducible systems, cumate repressor/operator systems, 4OHT/estrogen inducible systems, ecdysone-based inducible systems and FKBP12/FRAP (FKBP12-rapamycin complex) inducible systems.

[0925] 241. The method according to paragraph 236 wherein the inducer energy source is electromagnetic energy.

[0926] 242. The method according to paragraph 241 wherein the electromagnetic energy is a component of visible light.

[0927] 243. The method according to paragraph 242 wherein the component of visible light has a wavelength in the range of 450 nm-700 nm.

[0928] 244. The method according to paragraph 243 wherein the component of visible light has a wavelength in the range of 450 nm-500 nm.

[0929] 245. The method according to paragraph 244 wherein the component of visible light is blue light.

[0930] 246. The method according to paragraph 245 wherein the blue light has an intensity of at least 0.2 mW/cm².

[0931] 247. The method according to paragraph 245 wherein the blue light has an intensity of at least 4 mW/cm².

[0932] 248. The method according to paragraph 243 wherein the component of visible light has a wavelength in the range of 620-700 nm.

[0933] 249. The method according to paragraph 248 wherein the component of visible light is red light.

[0934] 250. The method according to paragraph 233 wherein the at least one functional domain is selected from the group consisting of: transposase domain, integrase domain, recombinase domain, resolvase domain, invertase domain, protease domain, DNA methyltransferase domain, DNA hydroxylmethylase domain, DNA demethylase domain, histone acetylase domain, histone deacetylases domain, nuclease domain, repressor domain, activator domain, nuclear-localization signal domains, transcription-regulatory protein (or transcription complex recruiting) domain, cellular uptake activity associated domain, nucleic acid binding domain, antibody presentation domain, histone modifying enzymes, recruiter of histone modifying enzymes; inhibitor of histone modifying enzymes, histone methyltransferase, histone demethylase, histone kinase, histone phosphatase, histone ribosylase, histone deribosylase, histone ubiquitinase, histone deubiquitinase, histone biotinase and histone tail protease.

[0935] 251. The system or method according to any of the preceding paragraphs wherein the TALE system comprises a DNA binding polypeptide comprising:
[0936] (i) a DNA binding domain comprising at least five or more Transcription activator-like effector (TALE) monomers and at least one or more half-monomers specifically ordered to target a locus of interest or
   [0937] at least one or more effector domains
   [0938] linked to an energy sensitive protein or fragment thereof, wherein the energy sensitive protein or fragment thereof undergoes a conformational change upon induction by an inducer energy source allowing it to bind an interacting partner, and/or
[0939] (ii) a DNA binding domain comprising at least one or more TALE monomers or half-monomers specifically ordered to target the locus of interest or
   [0940] at least one or more effector domains
   [0941] linked to the interacting partner, wherein the energy sensitive protein or fragment thereof binds to the interacting partner upon induction by the inducer energy source.

[0942] 252. The system or method of paragraph 251 wherein the DNA binding polypeptide comprises
[0943] (a) a N-terminal capping region
[0944] (b) a DNA binding domain comprising at least 5 to 40 Transcription activator-like effector (TALE) monomers and at least one or more half-monomers specifically ordered to target the locus of interest, and
[0945] (c) a C-terminal capping region

[0946] wherein (a), (b) and (c) are arranged in a predetermined N-terminus to C-terminus orientation,

[0947] wherein the genomic locus comprises a target DNA sequence 5′-T₀N₁N₂ . . . N_{z} N_{z+1}-3′, where T₀ and N=A, G, T or C,

[0948] wherein the target DNA sequence binds to the DNA binding domain, and the DNA binding domain comprises (X₁₋₁₁-X₁₂X₁₃-X_{14-33 or 34 or 35})_{z}.

[0949] wherein X₁₋₁₁ is a chain of 11 contiguous amino acids,

[0950] wherein X₁₂X₁₃ is a repeat variable diresidue (RVD),

[0951] wherein X_{14-33 or 34 or 35} is a chain of 21, 22 or 23 contiguous amino acids,

[0952] wherein z is at least 5 to 40,

[0953] wherein the polypeptide is encoded by and translated from a codon optimized nucleic acid molecule so that the polypeptide preferentially binds to DNA of the locus of interest.

[0954] 253. The system or method of paragraph 252 wherein
[0955] the N-terminal capping region or fragment thereof comprises 147 contiguous amino acids of a wild type N-terminal capping region, or
[0956] the C-terminal capping region or fragment thereof comprises 68 contiguous amino acids of a wild type C-terminal capping region, or
[0957] the N-terminal capping region or fragment thereof comprises 136 contiguous amino acids of a wild type N-terminal capping region and the C-terminal capping region or fragment thereof comprises 183 contiguous amino acids of a wild type C-terminal capping region.

[0958] 254. The system or method of paragraph 252 wherein at least one RVD is selected from the group consisting of (a) HH, KH, NH, NK, NQ, RH, RN, SS, NN, SN, KN for recognition of guanine (G); (b) NI, KI, RI, HI, SI for recognition of adenine (A); (c) NG, HG, KG, RG for recognition of thymine (T); (d) RD, SD, HD, ND, KD, YG for recognition of cytosine (C); (e) NV, HN for recognition of A or G; and (f) H*, HA, KA, N*, NA, NC, NS, RA, S*for recognition of A or T or G or C, wherein (*) means that the amino acid at X₁₃ is absent.

[0959] 255. The system or method of paragraph 254 wherein at least one RVD is selected from the group consisting of (a) HH, KH, NH, NK, NQ, RH, RN, SS for recognition of guanine (G); (b) SI for recognition of adenine (A); (c) HG, KG, RG for recognition of thymine (T); (d) RD, SD for recognition of cytosine (C); (e) NV, HN for recognition of A or G and (f) H*, HA, KA, N*, NA, NC, NS, RA, S*for recognition of A or T or G or C, wherein (*) means that the amino acid at X₁, is absent.

[0960] 256. The system or method of paragraph 255 wherein
[0961] the RVD for the recognition of G is RN, NH, RH or KH; or
[0962] the RVD for the recognition of A is SI; or
[0963] the RVD for the recognition of T is KG or RG; and
[0964] the RVD for the recognition of C is SD or RD.

[0965] 257. The system or method of paragraph 252 wherein at least one of the following is present
[0966] [LTLD](SEQ ID NO: 1) or [LTLA](SEQ ID NO: 2) or [LTQV](SEQ ID NO: 3) at X₁₋₄, or
[0967] [EQHG](SEQ ID NO: 4) or [RDHG](SEQ ID NO: 5) at positions X₃₀₋₃₃ or X₃₁₋₃₄ or X₃₂₋₃₅.

[0968] 258. The system or method according to any of paragraphs 251-257 wherein the TALE system is packaged into a AAV or a lentivirus vector.

[0969] 259. The system or method according to any of paragraphs 201-250 wherein the CRISPR system comprises a vector system comprising:

[0970] a) a first regulatory element operably linked to a CRISPR-Cas system guide RNA that targets a locus of interest,

[0971] b) a second regulatory inducible element operably linked to a Cas protein,

[0972] wherein components (a) and (b) are located on same or different vectors of the system,

[0973] wherein the guide RNA targets DNA of the locus of interest, wherein the Cas protein and the guide RNA do not naturally occur together.

[0974] 260. The system or method according to paragraph 259 wherein the Cas protein is a Cas9 enzyme.

[0975] 261. The system or method according to paragraphs 259 or 260 wherein the vector is AAV or lentivirus.

[0976] 301. A vector system comprising one or more vectors, wherein the system comprises

[0977] a. a first regulatory element operably linked to a tracr mate sequence and one or more insertion sites for inserting a guide sequence upstream of the tracr mate sequence, wherein when expressed, the guide sequence directs sequence-specific binding of a CRISPR complex to a target sequence in a eukaryotic cell, wherein the CRISPR complex comprises a CRISPR enzyme complexed with (1) the guide sequence that is hybridized to the target sequence, and (2) the tracr mate sequence that is hybridized to the tracr sequence; and

[0978] b. a second regulatory element operably linked to an enzyme-coding sequence encoding said CRISPR enzyme comprising a nuclear localization sequence;

[0979] wherein components (a) and (b) are located on the same or different vectors of the system.

[0980] 302. The vector system of paragraph 301, wherein component (a) further comprises the tracr sequence downstream of the tracr mate sequence under the control of the first regulatory element.

[0981] 303. The vector system of paragraph 301, wherein component (a) further comprises two or more guide sequences operably linked to the first regulatory element, wherein when expressed, each of the two or more guide sequences direct sequence specific binding of a CRISPR complex to a different target sequence in a eukaryotic cell.

[0982] 304. The vector system of paragraph 301, wherein the system comprises the tracr sequence under the control of a third regulatory element.

[0983] 305. The vector system of paragraph 301, wherein the tracr sequence exhibits at least 50% of sequence complementarity along the length of the tracr mate sequence when optimally aligned.

[0984] 306. The vector system of paragraph 301, wherein the CRISPR enzyme comprises one or more nuclear localization sequences of sufficient strength to drive accumulation of said CRISPR enzyme in a detectable amount in the nucleus of a eukaryotic cell.

[0985] 307. The vector system of paragraph 301, wherein the CRISPR enzyme is a type II CRISPR system enzyme.

[0986] 308. The vector system of paragraph 301, wherein the CRISPR enzyme is a Cas9 enzyme.

[0987] 309. The vector system of paragraph 301, wherein the CRISPR enzyme is codon-optimized for expression in a eukaryotic cell.

[0988] 310. The vector system of paragraph 301, wherein the CRISPR enzyme directs cleavage of one or two strands at the location of the target sequence.

[0989] 311. The vector system of paragraph 301, wherein the CRISPR enzyme lacks DNA strand cleavage activity.

[0990] 312. The vector system of paragraph 301, wherein the first regulatory element is a polymerase III promoter.

[0991] 313. The vector system of paragraph 301, wherein the second regulatory element is a polymerase II promoter.

[0992] 314. The vector system of paragraph 304, wherein the third regulatory element is a polymerase III promoter.

[0993] 315. The vector system of paragraph 301, wherein the guide sequence is at least 15 nucleotides in length.

[0994] 316. The vector system of paragraph 301, wherein fewer than 50% of the nucleotides of the guide sequence participate in self-complementary base-pairing when optimally folded.

[0995] 317. A vector comprising a regulatory element operably linked to an enzyme-coding sequence encoding a CRISPR enzyme comprising one or more nuclear localization sequences, wherein said regulatory element drives transcription of the CRISPR enzyme in a eukaryotic cell such that said CRISPR enzyme accumulates in a detectable amount in the nucleus of the eukaryotic cell.

[0996] 318. The vector of paragraph 317, wherein said regulatory element is a polymerase II promoter.

[0997] 319. The vector of paragraph 317, wherein said CRISPR enzyme is a type II CRISPR system enzyme.

[0998] 320. The vector of paragraph 317, wherein said CRISPR enzyme is a Cas9 enzyme.

[0999] 321. The vector of paragraph 317, wherein said CRISPR enzyme lacks the ability to cleave one or more strands of a target sequence to which it binds.

[1000] 322. A CRISPR enzyme comprising one or more nuclear localization sequences of sufficient strength to drive accumulation of said CRISPR enzyme in a detectable amount in the nucleus of a eukaryotic cell.

[1001] 323. The CRISPR enzyme of paragraph 322, wherein said CRISPR enzyme is a type II CRISPR system enzyme.

[1002] 324. The CRISPR enzyme of paragraph 322, wherein said CRISPR enzyme is a Cas9 enzyme.

[1003] 325. The CRISPR enzyme of paragraph 322, wherein said CRISPR enzyme lacks the ability to cleave one or more strands of a target sequence to which it binds.

[1004] 326. A eukaryotic host cell comprising:
[1005] a. a first regulatory element operably linked to a tracr mate sequence and one or more insertion sites for inserting a guide sequence upstream of the tracr mate sequence, wherein when expressed, the guide sequence directs sequence-specific binding of a CRISPR complex to a target sequence in a eukaryotic cell, wherein the CRISPR complex comprises a CRISPR enzyme complexed with (1) the guide sequence that is hybridized to the target sequence, and (2) the tracr mate sequence that is hybridized to the tracr sequence; and/or

[1006] b. a second regulatory element operably linked to an enzyme-coding sequence encoding said CRISPR enzyme comprising a nuclear localization sequence.

[1007] 327. The eukaryotic host cell of paragraph 326, wherein said host cell comprises components (a) and (b).

[1008] 328. The eukaryotic host cell of paragraph 326, wherein component (a), component (b), or components (a) and (b) are stably integrated into a genome of the host eukaryotic cell.

[1009] 329. The eukaryotic host cell of paragraph 326, wherein component (a) further comprises the tracr sequence downstream of the tracr mate sequence under the control of the first regulatory element.

[1010] 330. The eukaryotic host cell of paragraph 326, wherein component (a) further comprises two or more guide sequences operably linked to the first regulatory element, wherein when expressed, each of the two or more guide sequences direct sequence specific binding of a CRISPR complex to a different target sequence in a eukaryotic cell.

[1011] 331. The eukaryotic host cell of paragraph 326, further comprising a third regulatory element operably linked to said tracr sequence.

[1012] 332. The eukaryotic host cell of paragraph 326, wherein the tracr sequence exhibits at least 50% of sequence complementarity along the length of the tracr mate sequence when optimally aligned.

[1013] 333. The eukaryotic host cell of paragraph 326, wherein the CRISPR enzyme comprises one or more nuclear localization sequences of sufficient strength to drive accumulation of said CRISPR enzyme in a detectable mount in the nucleus of a eukaryotic cell.

[1014] 334. The eukaryotic host cell of paragraph 326, wherein the CRISPR enzyme is a type II CRISPR system enzyme.

[1015] 335. The eukaryotic host cell of paragraph 326, wherein the CRISPR enzyme is a Cas9 enzyme.

[1016] 336. The eukaryotic host cell of paragraph 326, wherein the CRISPR enzyme is codon-optimized for expression in a eukaryotic cell.

[1017] 337. The eukaryotic host cell of paragraph 326, wherein the CRISPR enzyme directs cleavage of one or two strands at the location of the target sequence.

[1018] 338. The eukaryotic host cell of paragraph 326, wherein the CRISPR enzyme lacks DNA strand cleavage activity.

[1019] 339. The eukaryotic host cell of paragraph 326, wherein the first regulatory element is a polymerase III promoter.

[1020] 340. The eukaryotic host cell of paragraph 326, wherein the second regulatory element is a polymerase II promoter.

[1021] 341. The eukaryotic host cell of paragraph 331, wherein the third regulatory element is a polymerase III promoter.

[1022] 342. The eukaryotic host cell of paragraph 326, wherein the guide sequence is at least 15 nucleotides in length.

[1023] 343. The eukaryotic host cell of paragraph 326, wherein fewer than 50% of the nucleotides of the guide sequence participate in self-complementary base-pairing when optimally folded.

[1024] 344. A non-human animal comprising a eukaryotic host cell of any one of paragraphs 326-343.

[1025] 345. A kit comprising a vector system and instructions for using said kit, the vector system comprising:

[1026] a. a first regulatory element operably linked to a tracr mate sequence and one or more insertion sites for inserting a guide sequence upstream of the tracr mate sequence, wherein when expressed, the guide sequence directs sequence-specific binding of a CRISPR complex to a target sequence in a eukaryotic cell, wherein the CRISPR complex comprises a CRISPR enzyme complexed with (1) the guide sequence that is hybridized to the target sequence, and (2) the tracr mate sequence that is hybridized to the tracr sequence; and/or

[1027] b. a second regulatory element operably linked to an enzyme-coding sequence encoding said CRISPR enzyme comprising a nuclear localization sequence.

[1028] 346. The kit of paragraph 345, wherein said kit comprises components (a) and (b) located on the same or different vectors of the system.

[1029] 347. The kit of paragraph 345, wherein component (a) further comprises the tracr sequence downstream of the tracr mate sequence under the control of the first regulatory element.

[1030] 348. The kit of paragraph 345, wherein component (a) further comprises two or more guide sequences operably linked to the first regulatory element, wherein when expressed, each of the two or more guide sequences direct sequence specific binding of a CRISPR complex to a different target sequence in a eukaryotic cell.

[1031] 349. The kit of paragraph 345, wherein the system comprises the tracr sequence under the control of a third regulatory element.

[1032] 350. The kit of paragraph 345, wherein the tracr sequence exhibits at least 50% of sequence complementarity along the length of the tracr mate sequence when optimally aligned.

[1033] 351. The kit of paragraph 345, wherein the CRISPR enzyme comprises one or more nuclear localization sequences of sufficient strength to drive accumulation of said CRISPR enzyme in a detectable mount in the nucleus of a eukaryotic cell.

[1034] 352. The kit of paragraph 345, wherein the CRISPR enzyme is a type II CRISPR system enzyme.

[1035] 353. The kit of paragraph 345, wherein the CRISPR enzyme is a Cas9 enzyme.

[1036] 354. The kit of paragraph 345, wherein the CRISPR enzyme is codon-optimized for expression in a eukaryotic cell.

[1037] 355. The kit of paragraph 345, wherein the CRISPR enzyme directs cleavage of one or two strands at the location of the target sequence.

[1038] 356. The kit of paragraph 345, wherein the CRISPR enzyme lacks DNA strand cleavage activity.

[1039] 357. The kit of paragraph 345, wherein the first regulatory element is a polymerase III promoter.

[1040] 358. The kit of paragraph 345, wherein the second regulatory element is a polymerase II promoter.

[1041] 359. The kit of paragraph 349, wherein the third regulatory element is a polymerase III promoter.

[1042] 360. The kit of paragraph 345, wherein the guide sequence is at least 15 nucleotides in length.

[1043] 361. The kit of paragraph 345, wherein fewer than 50% of the nucleotides of the guide sequence pmiicipate in self-complementary base-pairing when optimally folded.

[1044] 362. A computer system for selecting a candidate target sequence within a nucleic acid sequence in a eukaryotic cell for targeting by a CRISPR complex, the system comprising:

[1045] a. a memory unit configured to receive and/or store said nucleic acid sequence; and

[1046] b. one or more processors alone or in combination programmed to (i) locate a CRISPR motif sequence within said nucleic acid sequence, and (ii) select a sequence adjacent to said located CRISPR motif sequence as the candidate target sequence to which the CRISPR complex binds.

[1047] 363. The computer system of paragraph 362, wherein said locating step comprises identifying a CRISPR motif sequence located less than about 500 nucleotides away from said target sequence.

[1048] 364. The computer system of paragraph 362, wherein said candidate target sequence is at least 10 nucleotides in length.

[1049] 365. The computer system of paragraph 362, wherein the nucleotide at the 3′ end of the candidate target sequence is located no more than about 10 nucleotides upstream of the CRISPR motif sequence.

[1050] 366. The computer system of paragraph 362, wherein the nucleic acid sequence in the eukaryotic cell is endogenous to the eukaryotic genome.

[1051] 367. The computer system of claim 362, wherein the nucleic acid sequence in the eukaryotic cell is exogenous to the eukaryotic genome.

[1052] 368. A computer-readable medium comprising codes that, upon execution by one or more processors, implements a method of selecting a candidate target sequence within a nucleic acid sequence in a eukaryotic cell for targeting by a CRISPR complex, said method comprising: (a) locating a CRISPR motif sequence within said nucleic acid sequence, and (b) selecting a sequence adjacent to said located CRISPR motif sequence as the candidate target sequence to which the CRISPR complex binds.

[1053] 369. The computer-readable medium of paragraph 368, wherein said locating comprises locating a CRISPR motif sequence that is less than about 500 nucleotides away from said target sequence.

[1054] 370. The computer-readable of paragraph 368, wherein said candidate target sequence is at least 10 nucleotides in length.

[1055] 371. The computer-readable of paragraph 368, wherein the nucleotide at the 3′ end of the candidate target sequence is located no more than about 10 nucleotides upstream of the CRISPR motif sequence.

[1056] 372. The computer-readable of paragraph 368, wherein the nucleic acid sequence in the eukaryotic cell is endogenous the eukaryotic genome.

[1057] 373. The computer-readable of paragraph 368, wherein the nucleic acid sequence in the eukaryotic cell is exogenous to the eukaryotic genome.

[1058] 374. A method of modifying a target polynucleotide in a eukaryotic cell, the method comprising allowing a CRISPR complex to bind to the target polynucleotide to effect cleavage of said target polynucleotide thereby modifying the target polynucleotide, wherein the CRISPR complex comprises a CRISPR enzyme complexed with a guide sequence hybridized to a target sequence within said target polynucleotide, wherein said guide sequence is linked to a tracr mate sequence which in turn hybridizes to a tracr sequence.

[1059] 375. The method of paragraph 374, wherein said cleavage comprises cleaving one or two strands at the location of the target sequence by said CRISPR enzyme.

[1060] 376. The method of paragraph 374, wherein said cleavage results in decreased transcription of a target gene.

[1061] 377. The method of paragraph 374, further comprising repairing said cleaved target polynucleotide by homologous recombination with an exogenous template polynucleotide, wherein said repair results in a mutation comprising an insertion, deletion, or substitution of one or more nucleotides of said target polynucleotide.

[1062] 378. The method of paragraph 377, wherein said mutation results in one or more amino acid changes in a protein expressed from a gene comprising the target sequence.

[1063] 379. The method of paragraph 374, further comprising delivering one or more vectors to said eukaryotic cell, wherein the one or more vectors drive expression of one or more of: the CRISPR enzyme, the guide sequence linked to the tracr mate sequence, and the tracr sequence.

[1064] 380. The method of paragraph 379, wherein said vectors are delivered to the eukaryotic cell in a subject.

[1065] 381. The method of paragraph 374, wherein said modifying takes place in said eukaryotic cell in a cell culture.

[1066] 382. The method of paragraph 374, further comprising isolating said eukaryotic cell from a subject prior to said modifying.

[1067] 383. The method of paragraph 382, further comprising returning said eukaryotic cell and/or cells derived therefrom to said subject.

[1068] 384. A method of modifying expression of a polynucleotide in a eukaryotic cell, the method comprising: allowing a CRISPR complex to bind to the polynucleotide such that said binding results in increased or decreased expression of said polynucleotide; wherein the CRISPR complex comprises a CRISPR enzyme complexed with a guide sequence hybridized to a target sequence within said polynucleotide, wherein said guide sequence is linked to a tracr mate sequence which in turn hybridizes to a tracr sequence.

[1069] 385. The method of paragraph 374, further comprising delivering one or more vectors to said eukaryotic cells, wherein the one or more vectors drive expression of one or more of: the CRISPR enzyme, the guide sequence linked to the tracr mate sequence, and the tracr sequence.

[1070] 386. A method of generating a model eukaryotic cell comprising a mutated disease gene, the method comprising:

[1071] a. introducing one or more vectors into a eukaryotic cell, wherein the one or more vectors drive expression of one or more of: a CRISPR enzyme, a guide sequence linked to a tracr mate sequence, and a tracr sequence; and

[1072] b. allowing a CRISPR complex to bind to a target polynucleotide to effect cleavage of the target polynucleotide within said disease gene, wherein the CRISPR complex comprises the CRISPR enzyme complexed with (1) the guide sequence that is hybridized to the target sequence within the target polynucleotide, and (2) the tracr mate sequence that is hybridized to the tracr sequence, thereby generating a model eukaryotic cell comprising a mutated disease gene.

[1073] 387. The method of paragraph 386, wherein said cleavage comprises cleaving one or two strands at the location of the target sequence by said CRISPR enzyme.

[1074] 388. The method of paragraph 386, wherein said cleavage results in decreased transcription of a target gene.

[1075] 389. The method of paragraph 386, further comprising repairing said cleaved target polynucleotide by homologous recombination with an exogenous template polynucleotide, wherein said repair results in a mutation comprising an insertion, deletion, or substitution of one or more nucleotides of said target polynucleotide.

[1076] 390. The method of paragraph 389, wherein said mutation results in one or more amino acid changes in a protein expressed from a gene comprising the target sequence.

[1077] 391. A method of developing a biologically active agent that modulates a cell signaling event associated with a disease gene, comprising:

[1078] a. contacting a test compound with a model cell of any one of paragraphs 386-390; and

[1079] b. detecting a change in a readout that is indicative of a reduction or an augmentation of a cell signaling event associated with said mutation in said disease gene, thereby developing said biologically active agent that modulates said cell signaling event associated with said disease gene.

[1080] 392. A recombinant polynucleotide comprising a guide sequence upstream of a tracr mate sequence, wherein the guide sequence when expressed directs sequence-specific binding of a CRISPR complex to a corresponding target sequence present in a eukaryotic cell.

[1081] 393. The recombinant polynucleotide of paragraph 389, wherein the target sequence is a viral sequence present in a eukaryotic cell.

[1082] 394. The recombinant polynucleotide of paragraph 389, wherein the target sequence is a proto-oncogene or an oncogene.

[1083] 401. An engineered, non-naturally occurring Clustered Regularly Interspersed Short Palindromic Repeats (CRISPR)-CRISPR associated (Cas) (CRISPR-Cas) vector system comprising one or more vectors comprising:

[1084] a) a first regulatory element operably linked to one or more nucleotide sequences encoding one or more CRISPR-Cas system polynucleotide sequences comprising a guide sequence, a tracr RNA, and a tracr mate sequence, wherein the guide sequence hybridizes with one or more target sequences in polynucleotide loci in a eukaryotic cell,

[1085] b) a second regulatory element operably linked to a nucleotide sequence encoding a Type II Cas9 protein,

[1086] wherein components (a) and (b) are located on same or different vectors of the system,

[1087] wherein the CRISPR-Cas system comprises at least one switch,

[1088] whereby the activity of the system to target the one or more polynucleotide loci is controlled.

[1089] 402. The system of paragraph 401, wherein the CRISPR-Cas system comprises a trans-activating cr(tracr) sequence.

[1090] 403. The system of paragraph 401, wherein the Cas9 protein is codon optimized for expression in the eukaryotic cell and/or the eukaryotic cell is a mammalian or human cell.

[1091] 404. The system of paragraph 401, wherein the Cas9 protein comprises two or more mutations; or wherein the Cas9 protein comprises two or more mutations selected from the group consisting of D10A, E762A, H840A, N854A, N863A and D986A with reference to the position numbering of a Streptococcus pyogenes Cas9 protein

[1092] 405. The system of paragraph 401, wherein the one or more vectors are viral vectors.

[1093] 406. The system of paragraph 401, wherein the viral vectors are selected from the group consisting of retroviral, lentiviral, adenoviral, adeno-associated and herpes simplex viral vectors.

[1094] 407. The system of paragraph 401, wherein the control as to the at least one switch or the activity of said system is activated, enhanced, terminated or repressed.

[1095] 408. The system of paragraph 401, wherein the system further comprises at least one nuclear localization signal (NLS), functional domain, flexible linker, mutation, deletion, alteration or truncation.

[1096] 409. The system of paragraph 401, wherein the inducer energy source is heat, ultrasound, electromagnetic energy, or chemical, a small molecule, a hormone, abscisic acid (ABA), rapamycin, 4-hydroxytamoxifen (4OHT), estrogen or ecdysone.

[1097] 410. The system of paragraph 401, wherein the at least one switch is an antibiotic based inducible system, electromagnetic energy based inducible system, small molecule based inducible system, nuclear receptor based inducible system, hormone based inducible system, tetracycline (Tet) inducible system, light inducible system, ABA inducible system, 4OHT/estrogen inducible system, ecdysone-based inducible system or a FKBP12/FRAP (FKBP12-rapamycin complex) inducible system.

[1098] 411. The system according to paragraph 410 wherein the inducer energy source is electromagnetic energy.

[1099] 412. The system according to paragraph 411 wherein the electromagnetic energy is a component of visible light.

[1100] 413. The system according to paragraph 412 wherein the component of visible light is blue light.

[1101] 414. The system according to paragraph 414 wherein the blue light has an intensity of at least 0.2 mW/cm².

[1102] 415. The system according to paragraph 408 wherein the at least one functional domain is a transposase domain, integrase domain, recombinase domain, resolvase domain, invertase domain, protease domain, DNA methyltransferase domain, DNA demethylase domain, histone acetylase domain, histone deacetylases domain, nuclease domain, transcriptional repressor domain, transcriptional activator domain, nuclear-localization signal domains, or cellular signal domain.

[1103] 416. A method of modulating activity of any one of the systems of paragraphs 401-415, comprising administering the inducer energy source to the system, wherein the activity of the system is controlled by contact with the inducer energy source.

[1104] 417. An engineered, non-naturally occurring Transcription activator-like effector (TALE) system comprising a DNA binding polypeptide comprising:

[1105] a) a DNA binding domain comprising at least five or more Transcription activator-like effector (TALE) monomers and at least one or more half-monomers specifically ordered to target a locus of interest linked to an energy sensitive protein or fragment thereof, wherein the energy sensitive protein or fragment thereof undergoes a conformational change upon induction by an inducer energy source allowing it to bind an interacting partner, and/or

[1106] b) a DNA binding domain comprising at least one or more TALE monomers or half-monomers specifically ordered to target the locus of interest linked to the interacting partner, wherein the energy sensitive protein or fragment thereof binds to the interacting partner upon induction by the inducer energy source.

[1107] 418. The system of paragraph 417, wherein the one or more vectors are viral vectors

[1108] 419. The system of paragraph 417, wherein the viral vectors are selected from the group consisting of retroviral, lentiviral, adenoviral, adeno-associated and herpes simplex viral vectors.

[1109] 420. The system of paragraph 417, wherein the control as to the at least one switch or the activity of said system is activated, enhanced, terminated or repressed.

[1110] 421. The system of paragraph 417, wherein the system further comprises at least one nuclear localization signal (NLS), functional domain, flexible linker, mutation, deletion, alteration or truncation.

[1111] 422. The system of paragraph 417, wherein the inducer energy source is heat, ultrasound, electromagnetic energy, or chemical, a small molecule, a hormone, abscisic acid (ABA), rapamycin, 4-hydroxytamoxifen (4OHT), estrogen or ecdysone.

[1112] 423. The system of paragraph 417, wherein the at least one switch is an antibiotic based inducible system, electromagnetic energy based inducible system, small molecule based inducible system, nuclear receptor based inducible system, hormone based inducible system, tetracycline (Tet) inducible system, light inducible system. ABA inducible system, 4OHT/estrogen inducible system, ecdysone-based inducible system or a FKBP12/FRAP (FKBP12-rapamycin complex) inducible system.

[1113] 424. The system according to paragraph 423 wherein the inducer energy source is electromagnetic energy.

[1114] 425. The system according to paragraph 424 wherein the electromagnetic energy is a component of visible light.

[1115] 426. The system according to paragraph 425 wherein the component of visible light is blue light.

[1116] 427. The system according to paragraph 426 wherein the blue light has an intensity of at least 0.2 mW/cm².

[1117] 428. The system according to paragraph 421 wherein the at least one functional domain is selected from the group consisting of: transposase domain, integrase domain, recombinase domain, resolvase domain, invertase domain, protease domain, DNA methyltransferase domain, DNA demethylase domain, histone acetylase domain, histone deacetylases domain, nuclease domain, transcriptional repressor domain, transcriptional activator domain, nuclear-localization signal domains, or cellular signal domain.

[1118] 429. A method of modulating activity of any one of the systems of paragraphs 417-428, comprising administering the inducer energy source to the system, wherein the activity of the system is controlled by contact with the inducer energy source.

[1119] Having thus described in detail preferred embodiments of the present invention, it is to be understood that the invention defined by the above paragraphs is not to be limited to particular details set forth in the above description as many apparent variations thereof are possible without departing from the spirit or scope of the present invention.

The application's sequence listing, which the Patent Office published only in electronic form, follows.

SEQUENCE LISTING (599 sequences)

SEQ ID NO: 1 - protein, 4 aa, Artificial Sequence
  Description of Artificial Sequence: Synthetic peptide
LTLD

SEQ ID NO: 2 - protein, 4 aa, Artificial Sequence
  Description of Artificial Sequence: Synthetic peptide
LTLA

SEQ ID NO: 3 - protein, 4 aa, Artificial Sequence
  Description of Artificial Sequence: Synthetic peptide
LTQV

SEQ ID NO: 4 - protein, 4 aa, Artificial Sequence
  Description of Artificial Sequence: Synthetic peptide
EQHG

SEQ ID NO: 5 - protein, 4 aa, Artificial Sequence
  Description of Artificial Sequence: Synthetic peptide
RDHG

SEQ ID NO: 6 - protein, 8 aa, Artificial Sequence
  Description of Artificial Sequence: Synthetic peptide
LDLASLIL

SEQ ID NO: 7 - protein, 4 aa, Artificial Sequence
  Description of Artificial Sequence: Synthetic peptide
LTPD

SEQ ID NO: 8 - protein, 5 aa, Artificial Sequence
  Description of Artificial Sequence: Synthetic peptide
NQALE

SEQ ID NO: 9 - protein, 5 aa, Artificial Sequence
  Description of Artificial Sequence: Synthetic peptide
KRALE

SEQ ID NO: 10 - protein, 4 aa, Artificial Sequence
  Description of Artificial Sequence: Synthetic peptide
LTPE

SEQ ID NO: 11 - protein, 7 aa, Artificial Sequence
  Description of Artificial Sequence: Synthetic peptide
NGKQALE

SEQ ID NO: 12 - protein, 34 aa, Artificial Sequence
  Description of Artificial Sequence: Synthetic polypeptide
  MOD_RES (12)..(13): Any amino acid
LTPAQVVAIASXXGGKQALETVQRLLPVLCQDHG

SEQ ID NO: 13 - protein, 33 aa, Artificial Sequence
  Description of Artificial Sequence: Synthetic polypeptide
  MOD_RES (12)..(12): Any amino acid
LTPAQVVAIASXGGKQALETVQRLLPVLCQDHG

SEQ ID NO: 14 - protein, 34 aa, Artificial Sequence
  Description of Artificial Sequence: Synthetic polypeptide
  MOD_RES (12)..(13): Any amino acid
LTPDQVVAIANXXGGKQALATVQRLLPVLCQDHG

SEQ ID NO: 15 - protein, 34 aa, Artificial Sequence
  Description of Artificial Sequence: Synthetic polypeptide
  MOD_RES (12)..(13): Any amino acid
LTPDQVVAIANXXGGKQALETLQRLLPVLCQDHG

SEQ ID NO: 16 - protein, 34 aa, Artificial Sequence
  Description of Artificial Sequence: Synthetic polypeptide
  MOD_RES (12)..(13): Any amino acid
LTPDQVVAIANXXGGKQALETVQRLLPVLCQDHG

SEQ ID NO: 17 - protein, 34 aa, Artificial Sequence
  Description of Artificial Sequence: Synthetic polypeptide
  MOD_RES (12)..(13): Any amino acid
LTPDQVVAIASXXGGKQALATVQRLLPVLCQDHG

SEQ ID NO: 18 - protein, 34 aa, Artificial Sequence
  Description of Artificial Sequence: Synthetic polypeptide
  MOD_RES (12)..(13): Any amino acid
LTPDQVVAIASXXGGKQALETVQRLLPVLCQDHG

SEQ ID NO: 19 - protein, 34 aa, Artificial Sequence
  Description of Artificial Sequence: Synthetic polypeptide
  MOD_RES (12)..(13): Any amino acid
LTPDQVVAIASXXGGKQALETVQRVLPVLCQDHG

SEQ ID NO: 20 - protein, 34 aa, Artificial Sequence
  Description of Artificial Sequence: Synthetic polypeptide
  MOD_RES (12)..(13): Any amino acid
LTPEQVVAIASXXGGKQALETVQRLLPVLCQAHG

SEQ ID NO: 21 - protein, 34 aa, Artificial Sequence
  Description of Artificial Sequence: Synthetic polypeptide
  MOD_RES (12)..(13): Any amino acid
LTPYQVVAIASXXGSKQALETVQRLLPVLCQDHG

SEQ ID NO: 22 - protein, 34 aa, Artificial Sequence
  Description of Artificial Sequence: Synthetic polypeptide
  MOD_RES (12)..(13): Any amino acid
LTREQVVAIASXXGGKQALETVQRLLPVLCQDHG

SEQ ID NO: 23 - protein, 35 aa, Artificial Sequence
  Description of Artificial Sequence: Synthetic polypeptide
  MOD_RES (12)..(13): Any amino acid
LSTAQVVAIASXXGGKQALEGIGEQLLKLRTAPYG

SEQ ID NO: 24 - protein, 35 aa, Artificial Sequence
  Description of Artificial Sequence: Synthetic polypeptide
  MOD_RES (12)..(13): Any amino acid
LSTAQVVAVASXXGGKPALEAVRAQLLALRAAPYG

SEQ ID NO: 25 - protein, 288 aa, Artificial Sequence
  Description of Artificial Sequence: Synthetic polypeptide
MDPIRSRTPSPARELLSGPQPDGVQPTADRGVSPPAGGPLDGLPARRTMSRTRLPSPPAPSPAFSADSFSDLLRQFDPSLFNTSLFDSLPPFGAHHTEAATGEWDEVQSGLRAADAPPPTMRVAVTAARPPRAKPAPRRRAAQPSDASPAAQVDLRTLGYSQQQQEKIKPKVRSTVAQHHEALVGHGFTHAHIVALSQHPAALGTVAVKYQDMIAALPEATHEAIVGVGKQWSGARALEALLTVAGELRGPPLQLDTGQLLKIAKRGGVTAVEAVHAWRNALTGAPLN

SEQ ID NO: 26 - protein, 183 aa, Artificial Sequence
  Description of Artificial Sequence: Synthetic polypeptide
RPALESIVAQLSRPDPALAALTNDHLVALACLGGRPALDAVKKGLPHAPALIKRTNRRIPERTSHRVADHAQVVRVLGFFQCHSHPAQAFDDAMTQFGMSRHGLLQLFRRVGVTELEARSGTLPPASQRWDRILQASGMKRAKPSPTSTQTPDQASLHAFADSLERDLDAPSPMHEGDQTRAS

SEQ ID NO: 27 - DNA, 18 bp, Mus sp.
tgaatgatgataatacga

SEQ ID NO: 28 - protein, 11 aa, Artificial Sequence
  Description of Artificial Sequence: Synthetic peptide
SPKKKRKVEAS

SEQ ID NO: 29 - DNA, 14 bp, Homo sapiens
ttcttacttataac

SEQ ID NO: 30 - protein, 7 aa, Simian virus 40
PKKKRKV

SEQ ID NO: 31 - protein, 16 aa, Unknown
  Description of Unknown: Nucleoplasmin bipartite NLS peptide
KRPAATKKAGQAKKKK

SEQ ID NO: 32 - protein, 9 aa, Unknown
  Description of Unknown: C-myc NLS peptide
PAAKRVKLD

SEQ ID NO: 33 - protein, 11 aa, Unknown
  Description of Unknown: C-myc NLS peptide
RQRRNELKRSP

SEQ ID NO: 34 - protein, 38 aa, Homo sapiens
NQSSNFGPMKGGNFGGRSSGPYGGGGQYFAKPRNQGGY

SEQ ID NO: 35 - protein, 42 aa, Unknown
  Description of Unknown: IBB domain from importin-alpha NLS polypeptide
RMRIZFKNKGKDTAELRRRRVEVSVELRKAKKDEQILKRRNV

SEQ ID NO: 36 - protein, 8 aa, Unknown
  Description of Unknown: Myoma T NLS peptide
VSRKRPRP

SEQ ID NO: 37 - protein, 8 aa, Unknown
  Description of Unknown: Myoma T NLS peptide
PPKKARED

SEQ ID NO: 38 - protein, 7 aa, Homo sapiens
PQPKKKP

SEQ ID NO: 39 - protein, 12 aa, Mus sp.
SALIKKKKKMAP

SEQ ID NO: 40 - protein, 5 aa, Influenza virus
DRLRR

SEQ ID NO: 41 - protein, 7 aa, Influenza virus
PKQKKRK

SEQ ID NO: 42 - protein, 10 aa, Hepatitis virus
RKLKKKIKKL

SEQ ID NO: 43 - protein, 10 aa, Mus sp.
REKKKFLKRR

SEQ ID NO: 44 - protein, 20 aa, Homo sapiens
KRKGDEVDGVDEVAKKKSKK

SEQ ID NO: 45 - protein, 17 aa, Homo sapiens
RKCLQAGMNLEARKTKK

SEQ ID NO: 46 - DNA, 33 bp, Homo sapiens
ggaagggcctgagtccgagcagaagaagaaggg

SEQ ID NO: 47 - DNA, 33 bp, Homo sapiens
cattggaggtgacatcgatgtcctccccattgg

SEQ ID NO: 48 - DNA, 33 bp, Homo sapiens
ggacatcgatgtcacctccaatgactagggtgg

SEQ ID NO: 49 - DNA, 33 bp, Homo sapiens
catcgatgtcctccccattggcctgcttcgtgg

SEQ ID NO: 50 - DNA, 33 bp, Homo sapiens
ttcgtggcaatgcgccaccggttgatgtgatgg

SEQ ID NO: 51 - DNA, 33 bp, Homo sapiens
tcgtggcaatgcgccaccggttgatgtgatggg

SEQ ID NO: 52 - DNA, 33 bp, Homo sapiens
tccagcttctgccgtttgtactttgtcctccgg

SEQ ID NO: 53 - DNA, 33 bp, Homo sapiens
ggagggaggggcacagatgagaaactcaggagg

SEQ ID NO: 54 - DNA, 33 bp, Homo sapiens
aggggccgagattgggtgttcagggcagagagg

SEQ ID NO: 55 - DNA, 33 bp, Homo sapiens
atgcaggagggtggcgagaggggccgagattgg

SEQ ID NO: 56 - DNA, 33 bp, Homo sapiens
ggtggcgagaggggccgagattgggtgttcagg

SEQ ID NO: 57 - DNA, 33 bp, Mus musculus
caagcactgagtgccattagctaaatgcatagg

SEQ ID NO: 58 - DNA, 33 bp, Mus musculus
aatgcatagggtaccacccacaggtgccagggg

SEQ ID NO: 59 - DNA, 33 bp, Mus musculus
acacacatgggaaagcctctgggccaggaaagg

SEQ ID NO: 60 - DNA, 37 bp, Homo sapiens
ggaggaggtagtatacagaaacacagagaagtagaat

SEQ ID NO: 61 - DNA, 37 bp, Homo sapiens
agaatgtagaggagtcacagaaactcagcactagaaa

SEQ ID NO: 62 - DNA, 21 bp, Artificial Sequence
  Description of Artificial Sequence: Synthetic primer
aaaaccacccttctctctggc

SEQ ID NO: 63 - DNA, 21 bp, Artificial Sequence
  Description of Artificial Sequence: Synthetic primer
ggagattggagacacggagag

SEQ ID NO: 64 - DNA, 20 bp, Artificial Sequence
  Description of Artificial Sequence: Synthetic primer
ctggaaagccaatgcctgac

SEQ ID NO: 65 - DNA, 20 bp, Artificial Sequence
  Description of Artificial Sequence: Synthetic primer
ggcagcaaactccttgtcct

SEQ ID NO: 66 - DNA, 20 bp, Artificial Sequence
  Description of Artificial Sequence: Synthetic primer
gtgctttgcagaggcctacc

SEQ ID NO: 67 - DNA, 20 bp, Artificial Sequence
  Description of Artificial Sequence: Synthetic primer
cctggagcgcatgcagtagt

SEQ ID NO: 68 - DNA, 22 bp, Artificial Sequence
  Description of Artificial Sequence: Synthetic primer
accttctgtgtttccaccattc

SEQ ID NO: 69 - DNA, 20 bp, Artificial Sequence
  Description of Artificial Sequence: Synthetic primer
ttggggagtgcacagacttc

SEQ ID NO: 70 - DNA, 20 bp, Artificial Sequence
  Description of Artificial Sequence: Synthetic primer
ggctccctgggttcaaagta

SEQ ID NO: 71 - DNA, 21 bp, Artificial Sequence
  Description of Artificial Sequence: Synthetic primer
agaggggtctggatgtcgtaa

SEQ ID NO: 72 - DNA, 30 bp, Artificial Sequence
  Description of Artificial Sequence: Synthetic probe
tagctctaaaacttcttcttctgctcggac

SEQ ID NO: 73 - DNA, 30 bp, Artificial Sequence
  Description of Artificial Sequence: Synthetic probe
ctagccttattttaacttgctatgctgttt

SEQ ID NO: 74 - DNA, 335 bp, Artificial Sequence
  Description of Artificial Sequence: Synthetic polynucleotide
gagggcctatttcccatgattccttcatatttgcatatacgatacaaggctgttagagagataattggaattaatttgactgtaaacacaaagatattagtacaaaatacgtgacgtagaaagtaataatttcttgggtagtttgcagttttaaaattatgttttaaaatggactatcatatgcttaccgtaacttgaaagtatttcgatttcttggctttatatatcttgtggaaaggacgaaacaccggaaccattcaaaacagcatagcaagttaaaataaggctagtccgttatcaacttgaaaaagtggcaccgagtcggtgcttttttt

SEQ ID NO: 75 - DNA, 423 bp, Artificial Sequence
  Description of Artificial Sequence: Synthetic polynucleotide
gagggcctatttcccatgattccttcatatttgcatatacgatacaaggctgttagagagataattggaattaatttgactgtaaacacaaagatattagtacaaaatacgtgacgtagaaagtaataatttcttgggtagtttgcagttttaaaattatgttttaaaatggactatcatatgcttaccgtaacttgaaagtatttcgatttcttggctttatatatcttgtggaaaggacgaaacaccggtagtattaagtattgttttatggctgataaatttctttgaatttctccttgattatttgttataaaagttataaaataatcttgttggaaccattcaaaacagcatagcaagttaaaataaggctagtccgttatcaacttgaaaaagtggcaccgagtcggtgcttttttt

SEQ ID NO: 76 - DNA, 339 bp, Artificial Sequence
  Description of Artificial Sequence: Synthetic polynucleotide
gagggcctatttcccatgattccttcatatttgcatatacgatacaaggctgttagagagataattggaattaatttgactgtaaacacaaagatattagtacaaaatacgtgacgtagaaagtaataatttcttgggtagtttgcagttttaaaattatgttttaaaatggactatcatatgcttaccgtaacttgaaagtatttcgatttcttggctttatatatcttgtggaaaggacgaaacaccgggttttagagctatgctgttttgaatggtcccaaaacgggtcttcgagaagacgttttagagctatgctgttttgaatggtcccaaaac

SEQ ID NO: 77 - DNA, 309 bp, Artificial Sequence
  Description of Artificial Sequence: Synthetic polynucleotide
gagggcctatttcccatgattccttcatatttgcatatacgatacaaggctgttagagagataattggaattaatttgactgtaaacacaaagatattagtacaaaatacgtgacgtagaaagtaataatttcttgggtagtttgcagttttaaaattatgttttaaaatggactatcatatgcttaccgtaacttgaaagtatttcgatttcttggctttatatatcttgtggaaaggacgaaacaccgggtcttcgagaagacctgttttagagctagaaatagcaagttaaaataaggctagtccg

SEQ ID NO: 78 - DNA, 4269 bp, Artificial Sequence
  Description of Artificial Sequence: Synthetic polynucleotide
atggactataaggaccacgacggagactacaaggatcatgatattgattacaaagacgatgacgataagatggccccaaagaagaagcggaaggtcggtatccacggagtcccagcagccgacaagaagtacagcatcggcctggacatcggcaccaactctgtgggctgggccgtgatcaccgacgagtacaaggtgcccagcaagaaattcaaggtgctgggcaacaccgaccggcacagcatcaagaagaacctgatcggagccctgctgttcgacagcggcgaaacagccgaggccacccggctgaagagaaccgccagaagaagatacaccagacggaagaaccggatctgctatctgcaagagatcttcagcaacgagatggccaaggtggacgacagcttcttccacagactggaagagtccttcctggtggaagaggataagaagcacgagcggcaccccatcttcggcaacatcgtggacgaggtggcctaccacgagaagtaccccaccatctaccacctgagaaagaaactggtggacagcaccgacaaggccgacctgcggctgatctatctggccctggcccacatgatcaagttccggggccacttcctgatcgagggcgacctgaaccccgacaacagcgacgtggacaagctgttcatccagctggtgcagacctacaaccagctgttcgaggaaaaccccatcaacgccagcggcgtggacgccaaggccatcctgtctgccagactgagcaagagcagacggctggaaaatctgatcgcccagctgcccggcgagaagaagaatggcctgttcggcaacctgattgccctgagcctgggcctgacccccaacttcaagagcaacttcgacctggccgaggatgccaaactgcagctgagcaaggacacctacgacgacgacctggacaacctgctggcccagatcggcgaccagtacgccgacctgtttctggccgccaagaacctgtccgacgccatcctgctgagcgacatcctgagagtgaacaccgagatcaccaaggcccccctgagcgcctctatgatcaagagatacgacgagcaccaccaggacctgaccctgctgaaagctctcgtgcggcagcagctgcctgagaagtacaaagagattttcttcgaccagagcaagaacggctacgccggctacattgacggcggagccagccaggaagagttctacaagttcatcaagcccatcctggaaaagatggacggcaccgaggaactgctcgtgaagctgaacagagaggacctgctgcggaagcagcggaccttcgacaacggcagcatcccccaccagatccacctgggagagctgcacgccattctgcggcggcaggaagatttttacccattcctgaaggacaaccgggaaaagatcgagaagatcctgaccttccgcatcccctactacgtgggccctctggccaggggaaacagcagattcgcctggatgaccagaaagagcgaggaaaccatcaccccctggaacttcgaggaagtggtggacaagggcgcttccgcccagagcttcatcgagcggatgaccaacttcgataagaacctgcccaacgagaaggtgctgcccaagcacagcctgctgtacgagtacttcaccgtgtataacgagctgaccaaagtgaaatacgtgaccgagggaatgagaaagcccgccttcctgagcggcgagcagaaaaaggccatcgtggacctgctgttcaagaccaaccggaaagtgaccgtgaagcagctgaaagaggactacttcaagaaaatcgagtgcttcgactccgtggaaatctccggcgtggaagatcggttcaacgcctccctgggcacataccacgatctgctgaaaattatcaaggacaaggacttcctggacaatgaggaaaacgaggacattctggaagatatcgtgctgaccctgacactgtttgaggacagagagatgatcgaggaacggctgaaaacctatgcccacctgttcgacgacaaagtgatgaagcagctgaagcggcggagatacaccggctggggcaggctgagccggaagctgatcaacggcatccgggacaagcagtccggcaagacaatcctggatttcctgaagtccgacggcttcgccaacagaaacttcatgcagctgatccacgacgacagcctgacctttaaagaggacatccagaaagcccaggtgtccggccagggcgatagcctgcacgagcacattgccaatctggccggcagccccgccattaagaagggcatcctgcagacagtgaaggtggtggacgagctcgtgaaagtgatgggccggcacaagcccgagaacatcgtgatcgaaatggccagagagaaccagaccacccagaagggacagaagaacagccgcgagagaatgaagcggatcgaagagggcatcaaagagctgggcagccagatcctgaaagaacaccccgtggaaaacacccagctgcagaacgagaagctgtacctgtactacctgcagaatgggcgggatatgtacgtggaccaggaactggacatcaaccggctgtccgactacgatgtggaccatatcgtgcctcagagctttctgaaggacgactccatcgacaacaaggtgctgaccagaagcgacaagaaccggggcaagagcgacaacgtgccctccgaagaggtcgtgaagaagatgaagaactactggcggcagctgctgaacgccaagctgattacccagagaaagttcgacaatctgaccaaggccgagagaggcggcctgagcgaactggataaggccggcttcatcaagagacagctggtggaaacccggcagatcacaaagcacgtggcacagatcctggactcccggatgaacactaagtacgacgagaatgacaagctgatccgggaagtgaaagtgatcaccctgaagtccaagctggtgtccgatttccggaaggatttccagttttacaaagtgcgcgagatcaacaactaccaccacgcccacgacgcctacctgaacgccgtcgtgggaaccgccctgatcaaaaagtaccctaagctggaaagcgagttcgtgtacggcgactacaaggtgtacgacgtgcggaagatgatcgccaagagcgagcaggaaatcggcaaggctaccgccaagtacttcttctacagcaacatcatgaactttttcaagaccgagattaccctggccaacggcgagatccggaagcggcctctgatcgagacaaacggcgaaaccggggagatcgtgtgggataagggccgggattttgccaccgtgcggaaagtgctgagcatgccccaagtgaatatcgtgaaaaagaccgaggtgcagacaggcggcttcagcaaagagtctatcctgcccaagaggaacagcgataagctgatcgccagaaagaaggactgggaccctaagaagtacggcggcttcgacagccccaccgtggcctattctgtgctggtggtggccaaagtggaaaagggcaagtccaagaaactgaagagtgtgaaagagctgctggggatcaccatcatggaaagaagcagcttcgagaagaatcccatcgactttctggaagccaagggctacaaagaagtgaaaaaggacctgatcatcaagctgcctaagtactccctgttcgagctggaaaacggccggaagagaatgctggcctctgccggcgaactgcagaagggaaacgaactggccctgccctccaaatatgtgaacttcctgtacctggccagccactatgagaagctgaagggctcccccgaggataatgagcagaaacagctgtttgtggaacagcacaagcactacctggacgagatcatcgagcagatcagcgagttctccaagagagtgatcctggccgacgctaatctggacaaagtgctgtccgcctacaacaagcaccgggataagcccatcagagagcaggccgagaatatcatccacctgtttaccctgaccaatctgggagcccctgccgccttcaagtactttgacaccaccatcgaccggaagaggtacaccagcaccaaagaggtgctggacgccaccctgatccaccagagcatcaccggcctgtacgagacacggatcgacctgtctcagctgggaggcgacaagcgtcctgctgctactaagaaagctggtcaagctaagaaaaagaaa

SEQ ID NO: 79 - DNA, 1449 bp, Artificial Sequence
  Description of Artificial Sequence: Synthetic polynucleotide
atgaagcagctggaggagttactttctacctctttcgacatccagtttaatgacctgaccctgctggaaaccgccttcactcacacctcctacgcgaatgagcaccgcctactgaatgtgagccacaacgagcgcctggagtttctgggggatgctgtcttacagctgatcatctctgaatatctgtttgccaaataccctaagaaaaccgaaggggacatgtcaaagctgcgctccatgatagtcagggaagagagcctggcgggctttagtcgtttttgctcattcgacgcttatatcaagctgggaaaaggcgaagagaagtccggcggcaggaggcgcgatacaattctgggcgatctctttgaagcgtttctgggcgcacttctactggacaaagggatcgacgcagtccgccgctttctgaaacaagtgatgatccctcaggtcgaaaagggaaacttcgagagagtgaaggactataaaacatgtttgcaggaatttctccagaccaagggagatgtagcaatagattatcaggtaataagtgagaaaggaccagctcacgccaaacaattcgaagttagcatcgttgttaatggcgcagtgttgtcgaagggcttgggtaaatcaaaaaaactggccgagcaggacgctgctaaaaacgccctcgctcagctcagcgaggtaggatccgtgagcaagggcgaggaggataacatggccatcatcaaggagttcatgcgcttcaaggtgcacatggagggctccgtgaacggccacgagttcgagatcgagggcgagggcgagggccgcccctacgagggcacccagaccgccaagctgaaggtgaccaagggtggccccctgcccttcgcctgggacatcctgtcccctcagttcatgtacggctccaaggcctacgtgaagcaccccgccgacatccccgactacttgaagctgtccttccccgagggcttcaagtgggagcgcgtgatgaacttcgaggacggcggcgtggtgaccgtgacccaggactcctccctgcaggacggcgagttcatctacaaggtgaagctgcgcggcaccaacttcccctccgacggccccgtaatgcagaagaagaccatgggctgggaggcctcctccgagcggatgtaccccgaggacggcgccctgaagggcgagatcaagcagaggctgaagctgaaggacggcggccactacgacgctgaggtcaagaccacctacaaggccaagaagcccgtgcagctgcccggcgcctacaacgtcaacatcaagttggacatcacctcccacaacgaggactacaccatcgtggaacagtacgaacgcgccgagggccgccactccaccggcggcatggacgagctgtacaagaagcgtcctgctgctactaagaaagctggtcaagctaagaaaaagaaa

SEQ ID NO: 80 - DNA, 4269 bp, Artificial Sequence
  Description of Artificial Sequence: Synthetic polynucleotide
atggactataaggaccacgacggagactacaaggatcatgatattgattacaaagacgatgacgataagatggccccaaagaagaagcggaaggtcggtatccacggagtcccagcagccgacaagaagtacagcatcggcctggccatcggcaccaactctgtgggctgggccgtgatcaccgacgagtacaaggtgcccagcaagaaattcaaggtgctgggcaacaccgaccggcacagcatcaagaagaacctgatcggagccctgctgttcgacagcggcgaaacagccgaggccacccggctgaagagaaccgccagaagaagatacaccagacggaagaaccggatctgctatctgcaagagatcttcagcaacgagatggccaaggtggacgacagcttcttccacagactggaagagtccttcctggtggaagaggataagaagcacgagcggcaccccatcttcggcaacatcgtggacgaggtggcctaccacgagaagtaccccaccatctaccacctgagaaagaaactggtggacagcaccgacaaggccgacctgcggctgatctatctggccctggcccacatgatcaagttccggggccacttcctgatcgagggcgacctgaaccccgacaacagcgacgtggacaagctgttcatccagctggtgcagacctacaaccagctgttcgaggaaaaccccatcaacgccagcggcgtggacgccaaggccatcctgtctgccagactgagcaagagcagacggctggaaaatctgatcgcccagctgcccggcgagaagaagaatggcctgttcggcaacctgattgccctgagcctgggcctgacccccaacttcaagagcaacttcgacctggccgaggatgccaaactgcagctgagcaaggacacctacgacgacgacctggacaacctgctggcccagatcggcgaccagtacgccgacctgtttctggccgccaagaacctgtccgacgccatcctgctgagcgacatcctgagagtgaacaccgagatcaccaaggcccccctgagcgcctctatgatcaagagatacgacgagcaccaccaggacctgaccctgctgaaagctctcgtgcggcagcagctgcctgagaagtacaaagagattttcttcgaccagagcaagaacggctacgccggctacattgacggcggagccagccaggaagagttctacaagttcatcaagcccatcctggaaaagatggacggcaccgaggaactgctcgtgaagctgaacagagaggacctgctgcggaagcagcggaccttcgacaacggcagcatcccccaccagatccacctgggagagctgcacgccattctgcggcggcaggaagatttttacccattcctgaaggacaaccgggaaaagatcgagaagatcctgaccttccgcatcccctactacgtgggccctctggccaggggaaacagcagattcgcctggatgaccagaaagagcgaggaaaccatcaccccctggaacttcgaggaagtggtggacaagggcgcttccgcccagagcttcatcgagcggatgaccaacttcgataagaacctgcccaacgagaaggtgctgcccaagcacagcctgctgtacgagtacttcaccgtgtataacgagctgaccaaagtgaaatacgtgaccgagggaatgagaaagcccgccttcctgagcggcgagcagaaaaaggccatcgtggacctgctgttcaagaccaaccggaaagtgaccgtgaagcagctgaaagaggactacttcaagaaaatcgagtgcttcgactccgtggaaatctccggcgtggaagatcggttcaacgcctccctgggcacataccacgatctgctgaaaattatcaaggacaaggacttcctggacaatgaggaaaacgaggacattctggaagatatcgtgctgaccctgacactgtttgaggacagagagatgatcgaggaacggctgaaaacctatgcccacctgttcgacgacaaagtgatgaagcagctgaagcggcggagatacaccggctggggcaggctgagccggaagctgatcaacggcatccgggacaagcagtccggcaagacaatcctggatttcctgaagtccgacggcttcgccaacagaaacttcatgcagctgatccacgacgacagcctgacctttaaagaggacatccagaaagcccaggtgtccggccagggcgatagcctgcacgagcacattgccaatctggccggcagccccgccattaagaagggcatcctgcagacagtgaaggtggtggacgagctcgtgaaagtgatgggccggcacaagcccgagaacatcgtgatcgaaatggccagagagaaccagaccacccagaagggacagaagaacagccgcgagagaatgaagcggatcgaagagggcatcaaagagctgggcagccagatcctgaaagaacaccccgtggaaaacacccagctgcagaacgagaagctgtacctgtactacctgcagaatgggcgggatatgtacgtggaccaggaactggacatcaaccggctgtccgactacgatgtggaccatatcgtgcctcagagctttctgaaggacgactccatcgacaacaaggtgctgaccagaagcgacaagaaccggggcaagagcgacaacgtgccctccgaagaggtcgtgaagaagatgaagaactactggcggcagctgctgaacgccaagctgattacccagagaaagttcgacaatctgaccaaggccgagagaggcggcctgagcgaactggataaggccggcttcatcaagagacagctggtggaaacccggcagatcacaaagcacgtggcacagatcctggactcccggatgaacactaagtacgacgagaatgacaagctgatccgggaagtgaaagtgatcaccctgaagtccaagctggtgtccgatttccggaaggatttccagttttacaaagtgcgcgagatcaacaactaccaccacgcccacgacgcctacctgaacgccgtcgtgggaaccgccctgatcaaaaagtaccctaagctggaaagcgagttcgtgtacggcgactacaaggtgtacgacgtgcggaagatgatcgccaagagcgagcaggaaatcggcaaggctaccgccaagtacttcttctacagcaacatcatgaactttttcaagaccgagattaccctggccaacggcgagatccggaagcggcctctgatcgagacaaacggcgaaaccggggagatcgtgtgggataagggccgggattttgccaccgtgcggaaagtgctgagcatgccccaagtgaatatcgtgaaaaagaccgaggtgcagacaggcggcttcagcaaagagtctatcctgcccaagaggaacagcgataagctgatcgccagaaagaaggactgggaccctaagaagtacggcggcttcgacagccccaccgtggcctattctgtgctggtggtggccaaagtggaaaagggcaagtccaagaaactgaagagtgtgaaagagctgctggggatcaccatcatggaaagaagcagcttcgagaagaatcccatcgactttctggaagccaagggctacaaagaagtgaaaaaggacctgatcatcaagctgcctaagtactccctgttcgagctggaaaacggccggaagagaatgctggcctctgccggcgaactgcagaagggaaacgaactggccctgccctccaaatatgtgaacttcctgtacctggccagccactatgagaagctgaagggctcccccgaggataatgagcagaaacagctgtttgtggaacagcacaagcactacctggacgagatcatcgagcagatcagcgagttctccaagagagtgatcctggccgacgctaatctggacaaagtgctgtccgcctacaacaagcaccgggataagcccatcagagagcaggccgagaatatcatccacctgtttaccctgaccaatctgggagcccctgccgccttcaagtactttgacaccaccatcgaccggaagaggtacaccagcaccaaagaggtgctggacgccaccctgatccaccagagcatcaccggcctgtacgagacacggatcgacctgtctcagctgggaggcgacaagcgtcctgctgctactaagaaagctggtcaagctaagaaaaagaaa

SEQ ID NO: 81 - DNA, 2012 bp, Artificial Sequence
  Description of Artificial Sequence: Synthetic polynucleotide
gaatgctgccctcagacccgcttcctccctgtccttgtctgtccaaggagaatgaggtctcactggtggatttcggactaccctgaggagctggcacctgagggacaaggccccccacctgcccagctccagcctctgatgaggggtgggagagagctacatgaggttgctaagaaagcctcccctgaaggagaccacacagtgtgtgaggttggagtctctagcagcgggttctgtgcccccagggatagtctggctgtccaggcactgctcttgatataaacaccacctcctagttatgaaaccatgcccattctgcctctctgtatggaaaagagcatggggctggcccgtggggtggtgtccactttaggccctgtgggagatcatgggaacccacgcagtgggtcataggctctctcatttactactcacatccactctgtgaagaagcgattatgatctctcctctagaaactcgtagagtcccatgtctgccggcttccagagcctgcactcctccaccttggcttggctttgctggggctagaggagctaggatgcacagcagctctgtgaccctttgtttgagaggaacaggaaaaccacccttctctctggcccactgtgtcctcttcctgccctgccatccccttctgtgaatgttagacccatgggagcagctggtcagaggggaccccggcctggggcccctaaccctatgtagcctcagtcttcccatcaggctctcagctcagcctgagtgttgaggccccagtggctgctctgggggcctcctgagtttctcatctgtgcccctccctccctggcccaggtgaaggtgtggttccagaaccggaggacaaagtacaaacggcagaagctggaggaggaagggcctgagtccgagcagaagaagaagggctcccatcacatcaaccggtggcgcattgccacgaagcaggccaatggggaggacatcgatgtcacctccaatgacaagcttgctagcggtgggcaaccacaaacccacgagggcagagtgctgcttgctgctggccaggcccctgcgtgggcccaagctggactctggccactccctggccaggctttggggaggcctggagtcatggccccacagggcttgaagcccggggccgccattgacagagggacaagcaatgggctggctgaggcctgggaccacttggccttctcctcggagagcctgcctgcctgggcgggcccgcccgccaccgcagcctcccagctgctctccgtgtctccaatctcccttttgttttgatgcatttctgttttaatttattttccaggcaccactgtagtttagtgatccccagtgtcccccttccctatgggaataataaaagtctctctcttaatgacacgggcatccagctccagccccagagcctggggtggtagattccggctctgagggccagtgggggctggtagagcaaacgcgttcagggcctgggagcctggggtggggtactggtggagggggtcaagggtaattcattaactcctctcttttgttgggggaccctggtctctacctccagctccacagcaggagaaacaggctagacatagggaagggccatcctgtatcttgagggaggacaggcccaggtctttcttaacgtattgagaggtgggaatcaggcccaggtagttcaatgggagagggagagtgcttccctctgcctagagactctggtggcttctccagttgaggagaaaccagaggaaaggggaggattggggtctgggggagggaacaccattcacaaaggctgacggttccagtccgaagtcgtgggcccaccaggatgctcacctgtccttggagaaccgctgggcaggttgagactgcagagacagggcttaaggctgagcctgcaaccagtccccagtgactcagggcctcctcagcccaagaaagagcaacgtgccagggcccgctgagctcttgtgttcacctg

SEQ ID NO: 82 - DNA, 3462 bp, Artificial Sequence
  Description of Artificial Sequence: Synthetic polynucleotide
atgaaaaggccggcggccacgaaaaaggccggccaggcaaaaaagaaaaagtccgacctggtacttggactggatattggtatcggttcggtgggagtcggaatcctcaacaaggtcacgggggagatcattcacaagaactcgcggatcttccccgcagctcaggctgagaacaacttggtgcggagaacgaataggcagggcaggcgactggcgaggaggaagaaacacaggagagtccgattgaaccggctgttcgaggagtccggtttgatcaccgactttacgaaaatctcgattaaccttaatccctatcagcttcgggtgaaaggcctgacagacgaactttcgaatgaggaacttttcatcgcgctgaaaaacatggtcaagcacagagggatttcctacctcgatgacgcctcggatgacggaaattcctcagtaggagattatgcacagatcgtgaaagagaactcaaagcaactggaaacaaagacaccggggcagatccaacttgaaagataccagacatacggacagctcagaggagattttacggtggagaaggacggtaaaaagcacagactcattaacgtatttcccacgtcggcgtacagatccgaagcgctccgcatccttcagactcaacaggagttcaacccgcaaattactgatgagttcatcaaccgctatttggaaatcttgaccggaaagcgcaagtattatcatgggccgggtaatgagaaatccagaacagattacggccgatacagaacttcgggggaaaccttggataacatctttggtattttgattggaaagtgcaccttttacccggacgagtttcgagcggccaaggcgtcatacacagcacaagagtttaatctcttgaatgatttgaacaacttgacggtccccacggagacaaagaagctctccaaagagcaaaagaaccaaatcatcaactacgtcaagaacgagaaggctatggggccagcgaagctgttcaagtatatcgctaaacttctcagctgtgatgtggcggacatcaaagggtaccgaatcgacaagtcgggaaaagcggaaattcacacgtttgaagcatatcgaaagatgaaaacgttggaaacactggacattgagcagatggaccgggaaacgctcgacaaactggcatacgtgctcacgttgaatactgaacgagagggaatccaagaggcccttgaacatgagttcgccgatggatcgttcagccagaagcaggtcgacgaacttgtgcaattccgcaaggcgaatagctccatcttcgggaagggatggcacaacttttcggtcaaactcatgatggagttgatcccagaactttatgagacttcggaggagcaaatgacgatcttgacgcgcttggggaaacagaaaacgacaagctcatcgaacaaaactaagtacattgatgagaaattgctgacggaagaaatctataatccggtagtagcgaaatcggtaagacaagcgatcaaaatcgtgaacgcggcgatcaaggaatatggtgactttgataacatcgtaattgaaatggctagagagacgaacgaagatgacgagaaaaaggcaatccagaagatccagaaggccaacaaggatgaaaaagatgcagcgatgcttaaagcggccaaccaatacaatggaaaggcggagctgccccattcagtgtttcacggtcataaacagttggcgaccaagatccgactctggcatcagcagggtgagcggtgtctctacaccggaaagactatctccatccatgacttgattaacaattcgaaccagtttgaagtggatcatattctgcccctgtcaatcacctttgacgactcgcttgcgaacaaggtgctcgtgtacgcaacggcaaatcaggagaaaggccagcggactccgtatcaggcgctcgactcaatggacgatgcgtggtcattccgggagctgaaggcgttcgtacgcgagagcaagacactgagcaacaaaaagaaagagtatctgctgacagaggaggacatctcgaaattcgatgtcaggaagaagttcatcgagcggaatcttgtcgacactcgctacgcttccagagtagtactgaacgcgctccaggaacactttagagcgcacaaaattgacacgaaggtgtcagtggtgagagggcagttcacatcccaactccgccgacattggggcatcgaaaagacgcgggacacatatcaccatcatgcggtggacgcgctgattattgccgcttcgtcccagttgaatctctggaaaaagcagaagaacacgctggtgtcgtattcggaggatcagcttttggacatcgaaaccggggagctgatttccgacgatgaatacaaagaatcggtgtttaaggcaccatatcagcatttcgtggacacgctgaagagcaaagagtttgaggacagcatcctcttttcgtaccaagtggactcgaagtttaatcgcaagatttcagacgccacaatctacgcgacgaggcaggcgaaggtgggcaaagataaagcagatgaaacctacgtccttggtaaaatcaaggacatctacactcaggacgggtacgatgcgttcatgaaaatctacaagaaggataagtcgaagtttctcatgtaccgccacgatccacagactttcgaaaaagtcattgagcctattttggagaactaccctaacaagcaaatcaacgagaaagggaaagaagtcccgtgcaacccctttctgaagtacaaggaagagcacggttatatccgcaaatactcgaagaaaggaaatgggcctgagattaagtcgcttaagtattacgactcaaagttgggtaaccacatcgacattaccccgaaagactccaacaacaaagtcgtgttgcagtccgtctcgccctggcgagcagatgtgtattttaataagacgaccggcaaatatgagatccttggactcaaatacgcagaccttcaattcgaaaaggggacgggcacttataagatttcacaagagaagtacaacgacatcaagaaaaaggaaggggtcgattcagattcggagttcaaattcaccctctacaaaaacgacctcctgcttgtgaaggacacagaaacgaaggagcagcagctctttcggttcctctcacgcacgatgcccaaacaaaaacattacgtcgaacttaaaccttacgataagcaaaagtttgaagggggagaggcactgatcaaagtattgggtaacgtagccaatagcggacagtgtaagaaagggctgggaaagtccaatatctcgatctataaagtacgaacagatgtattgggaaaccagcatatcatcaaaaatgagggggataaacccaaactcgatttcaagcgtcctgctgctactaagaaagctggtcaagctaagaaaaagaaataa

SEQ ID NO: 83 - DNA, 340 bp, Artificial Sequence
  Description of Artificial Sequence: Synthetic polynucleotide
gagggcctatttcccatgattccttcatatttgcatatacgatacaaggctgttagagagataattggaattaatttgactgtaaacacaaagatattagtacaaaatacgtgacgtagaaagtaataatttcttgggtagtttgcagttttaaaattatgttttaaaatggactatcatatgcttaccgtaacttgaaagtatttcgatttcttggctttatatatcttgtggaaaggacgaaacaccgttacttaaatcttgcagaagctacaaagataaggcttcatgccgaaatcaacaccctgtcattttatggcagggtgttttcgttatttaa

SEQ ID NO: 84 - DNA, 2601 bp, Artificial Sequence
  Description of Artificial Sequence: Synthetic polynucleotide
atggactataaggaccacgacggagactacaaggatcatgatattgattacaaagacgatgacgataagatggccccaaagaagaagcggaaggtcggtatccacggagtcccagcagccgtagatttgagaactttgggatattcacagcagcagcaggaaaagatcaagcccaaagtgaggtcgacagtcgcgcagcatcacgaagcgctggtgggtcatgggtttacacatgcccacatcgtagccttgtcgcagcaccctgcagcccttggcacggtcgccgtcaagtaccaggacatgattgcggcgttgccggaagccacacatgaggcgatcgtcggtgtggggaaacagtggagcggagcccgagcgcttgaggccctgttgacggtcgcgggagagctgagagggcctccccttcagctggacacgggccagttgctgaagatcgcgaagcggggaggagtcacggcggtcgaggcggtgcacgcgtggcgcaatgcgctcacgggagcacccctcaacctgaccccagagcaggtcgtggcaattgcgagcaaccacgggggaaagcaggcactcgaaaccgtccagaggttgctgcctgtgctgtgccaagcgcacggacttacgccagagcaggtcgtggcaattgcgagcaaccacgggggaaagcaggcactcgaaaccgtccagaggttgctgcctgtgctgtgccaagcgcacggactaaccccagagcaggtcgtggcaattgcgagcaacatcgggggaaagcaggcactcgaaaccgtccagaggttgctgcctgtgctgtgccaagcgcacgggttgaccccagagcaggtcgtggcaattgcgagcaaccacgggggaaagcaggcactcgaaaccgtccagaggttgctgcctgtgctgtgccaagcgcacggcctgaccccagagcaggtcgtggcaattgcgagcaaccacgggggaaagcaggcactcgaaaccgtccagaggttgctgcctgtgctgtgccaagcgcacggactgacaccagagcaggtcgtggcaattgcgagcaacatcgggggaaagcaggcactcgaaaccgtccagaggttgctgcctgtgctgtgccaagcgcacggacttacacccgaacaagtcgtggcaattgcgagcaaccacgggggaaagcaggcactcgaaaccgtccagaggttgctgcctgtgctgtgccaagcgcacggacttacgccagagcaggtcgtggcaattgcgagcaaccacgggggaaagcaggcactcgaaaccgtccagaggttgctgcctgtgctgtgccaagcgcacggactaaccccagagcaggtcgtggcaattgcgagcaacatcgggggaaagcaggcactcgaaaccgtccagaggttgctgcctgtgctgtgccaagcgcacgggttgaccccagagcaggtcgtggcaattgcgagcaacatcgggggaaagcaggcactcgaaaccgtccagaggttgctgcctgtgctgtgccaagcgcacggcctgaccccagagcaggtcgtggcaattgcgagcaaccacgggggaaagcaggcactcgaaaccgtccagaggttgctgcctgtgctgtgccaagcgcacggactgacaccagagcaggtcgtggcaattgcgagcaaccacgggggaaagcaggcactcgaaaccgtccagaggttgctgcctgtgctgtgccaagcgcacggactcacgcctgagcaggtagtggctattgcatccaacaacgggggcagacccgcactggagtcaatcgtggcccagctttcgaggccggaccccgcgctggccgcactcactaatgatcatcttgtagcgctggcctgcctcggcggacgacccgccttggatgcggtgaagaaggggctcccgcacgcgcctgcattgattaagcggaccaacagaaggattcccgagaggacatcacatcgagtggcaggttcccaactcgtgaagagtgaacttgaggagaaaaagtcggagctgcggcacaaattgaaatacgtaccgcatgaatacatcgaacttatcgaaattgctaggaactcgactcaagacagaatccttgagatgaaggtaatggagttctttatgaaggtttatggataccgagggaagcatctcggtggatcacgaaaacccgacggagcaatctatacggtggggagcccgattgattacggagtgatcgtcgacacgaaagcctacagcggtgggtacaatcttcccatcgggcaggcagatgagatgcaacgttatgtcgaagaaaatcagaccaggaacaaacacatcaatccaaatgagtggtggaaagtgtatccttcatcagtgaccgagtttaagtttttgtttgtctctgggcatttcaaaggcaactataaggcccagctcacacggttgaatcacattacgaactgcaatggtgcggttttgtccgtagaggaactgctcattggtggagaaatgatcaaagcgggaactctgacactggaagaagtcagacgcaagtttaacaatggcgagatcaatttccgctca

SEQ ID NO: 85 - DNA, 2600 bp, Artificial Sequence
  Description of Artificial Sequence: Synthetic polynucleotide
atggactataaggaccacgacggagactacaaggatcatgatattgattacaaagacgatgacgataagatggccccaaagaagaagcggaaggtcggtatccacggagtcccagcagccgtagatttgagaactttgggatattcacagcagcagcaggaaaagatcaagcccaaagtgaggtcgacagtcgcgcagcatcacgaagcgctggtgggtcatgggtttacacatgcccacatcgtagccttgtcgcagcaccctgcagcccttggcacggtcgccgtcaagtaccaggacatgattgcggcgttgccggaagccacacatgaggcgatcgtcggtgtggggaaacagtggagcggagcccgagcgcttgaggccctgttgacggtcgcgggagagctgagagggcctccccttcagctggacacgggccagttgctgaagatcgcgaagcggggaggagtcacggcggtcgaggcggtgcacgcgtggcgcaatgcgctcacgggagcacccctcaacctgaccccagagcaggtcgtggcaattgcgagcaaccacgggggaaagcaggcactcgaaaccgtccagaggttgctgcctgtgctgtgccaagcgcacggacttacgccagagcaggtcgtggcaattgcgagcaaccacgggggaaagcaggcactcgaaaccgtccagaggttgctgcctgtgctgtgccaagcgcacggactaaccccagagcaggtcgtggcaattgcgagcaaccacgggggaaagcaggcactcgaaaccgtccagaggttgctgcctgtgctgtgccaagcgcacgggttgaccccagagcaggtcgtggcaattgcgagcaacatcgggggaaagcaggcactcgaaaccgtccagaggttgctgcctgtgctgtgccaagcgcacggcctgaccccagagcaggtcgtggcaattgcgagcaaccacgggggaaagcaggcactcgaaaccgtccagaggttgctgcctgtgctgtgccaagcgcacggactgacaccagagcaggtcgtggcaattgcgagccatgacgggggaaagcaggcactcgaaaccgtccagaggttgctgcctgtgctgtgccaagcgcacggacttacacccgaacaagtcgtggcaattgcgagccatgacgggggaaagcaggcactcgaaaccgtccagaggttgctgcctgtgctgtgccaagcgcacggacttacgccagagcaggtcgtggcaattgcgagccatgacgggggaaagcaggcactcgaaaccgtccagaggttgctgcctgtgctgtgccaagcgcacggactaaccccagagcaggtcgtggcaattgcgagcaacggagggggaaagcaggcactcgaaaccgtccagaggttgctgcctgtgctgtgccaagcgcacgggttgaccccagagcaggtcgtggcaattgcgagcaacggagggggaaagcaggcactcgaaaccgtccagaggttgctgcctgtgctgtgccaagcgcacggcctgaccccagagcaggtcgtggcaattgcgagccatgacgggggaaagcaggcactcgaaaccgtccagaggttgctgcctgtgctgtgccaagcgcacggactgacaccagagcaggtcgtggcaattgcgagcaacggagggggaaagcaggcactcgaaaccgtccagaggttgctgcctgtgctgtgccaagcgcacggactcacgcctgagcaggtagtggctattgcatccaacggagggggcagacccgcactggagtcaatcgtggcccagctttcgaggccggaccccgcgctggccgcactcactaatgatcatcttgtagcgctggcctgcctcggcggacgacccgccttggatgcggtgaagaaggggctcccgcacgcgcctgcattgattaagcggaccaacagaaggattcccgagaggaatcacatcgagtggcaggttcccaactcgtgaagagtgaacttgaggagaaaaagtcggagctgcggcacaaattgaaatacgtaccgcatgaatacatcgaacttatcgaaattgctaggaactcgactcaagacagaatccttgagatgaaggtaatggagttctttatgaaggtttatggataccgagggaagcatctcggtggatcacgaaaacccgacggagcaatctatacggtggggagcccgattgattacggagtgatcgtcgacacgaaagcctacagcggtgggtacaatcttcccatcgggcaggcagatgagatgcaacgttatgtcgaagaaaatcagaccaggaacaaacacatcaatccaaatgagtggtggaaagtgtatccttcatcagtgaccgagtttaagtttttgtttgtctctgggcatttcaaaggcaactataaggcccagctcacacggttgaatcacattacgaactgcaatggtgcggttttgtccgtagaggaactgctcattggtggagaaatgatcaaagcgggaactctgacactggaagaagtcagacgcaagtttaacaatggcgagatcaatttccgctca

SEQ ID NO: 86 - DNA, 141 bp, Artificial Sequence
  Description of Artificial Sequence: Synthetic polynucleotide
cctgcaggcagctgcgcgctcgctcgctcactgaggccgcccgggcaaagcccgggcgtcgggcgacctttggtcgcccggcctcagtgagcgagcgagcgcgcagagagggagtggccaactccatcactaggggttcct

SEQ ID NO: 87 - DNA, 141 bp, Artificial Sequence
  Description of Artificial Sequence: Synthetic polynucleotide
aggaacccctagtgatggagttggccactccctctctgcgcgctcgctcgctcactgaggccgggcgaccaaaggtcgcccgacgcccgggctttgcccgggcggcctcagtgagcgagcgagcgcgcagctgcctgcagg

SEQ ID NO: 88 - DNA, 485 bp, Artificial Sequence
  Description of Artificial Sequence: Synthetic polynucleotide
gtgtctagactgcagagggccctgcgtatgagtgcaagtgggttttaggaccaggatgaggcggggtgggggtgcctacctgacgaccgaccccgacccactggacaagcacccaacccccattccccaaattgcgcatcccctatcagagagggggaggggaaacaggatgcggcgaggcgcgtgcgcactgccagcttcagcaccgcggacagtgccttcgcccccgcctggcggcgcgcgccaccgccgcctcagcactgaaggcgcgctgacgtcactcgccggtcccccgcaaactccccttcccggccaccttggtcgcgtccgcgccgccgccggcccagccggaccgcaccacgcgaggcgcgagataggggggcacgggcgcgaccatctgcgctgcggcgccggcgactcagcgctgcctcagtctgcggtgggcagcggaggagtcgtgtcgtgcctgagagcgcagtcgagaa

SEQ ID NO: 89 - DNA, 408 bp, Artificial Sequence
  Description of Artificial Sequence: Synthetic polynucleotide
gtagatttgagaactttgggatattcacagcagcagcaggaaaagatcaagcccaaagtgaggtcgacagtcgcgcagcatcacgaagcgctggtgggtcatgggtttacacatgcccacatcgtagccttgtcgcagcaccctgcagcccttggcacggtcgccgtcaagtaccaggacatgattgcggcgttgccggaagccacacatgaggcgatcgtcggtgtggggaaacagtggagcggagcccgagcgcttgaggccctgttgacggtcgcgggagagctgagagggcctccccttcagctggacacgggccagttgctgaagatcgcgaagcggggaggagtcacggcggtcgaggcggtgcacgcgtggcgcaatgcgctcacgggagcacccctcaac

SEQ ID NO: 90 - DNA, 164 bp, Artificial Sequence
  Description of Artificial Sequence: Synthetic polynucleotide
cggaccccgcgctggccgcactcactaatgatcatcttgtagcgctggcctgcctcggcggacgacccgccttggatgcggtgaagaaggggctcccgcacgcgcctgcattgattaagcggaccaacagaaggattcccgagaggacatcacatcgagtggca

SEQ ID NO: 91 - DNA, 858 bp, Artificial Sequence
  Description of Artificial Sequence: Synthetic polynucleotide
atgagtattcaacatttccgtgtcgcccttattcccttttttgcggcattttgccttcctgtttttgctcacccagaaacgctggtgaaagtaaaagatgctgaagatcagttgggtgcacgagtgggttacatcgaactggatctcaacagcggtaagatccttgagagttttcgccccgaagaacgttttccaatgatgagcacttttaaagttctgctatgtggcgcggtattatcccgtattgacgccgggcaagagcaactcggtcgccgcatacactattctcagaatgacttggttgagtactcaccagtcacagaaaagcatcttacggatggcatgacagtaagagaattatgcagtgctgccataaccatgagtgataacactgcggccaacttacttctgacaacgatcggaggaccgaaggagctaaccgcttttttgcacaacatgggggatcatgtaactcgccttgatcgttgggaaccggagctgaatgaagccataccaaacgacgagcgtgacaccacgatgcctgtagcaatggcaacaacgttgcgcaaactattaactggcgaactacttactctagcttcccggcaacaattaatagactggatggaggcggataaagttgcaggaccacttctgcgctcggcccttccggctggctggtttattgctgataaatctggagccggtgagcgtgggtctcgcggtatcattgcagcactggggccagatggtaagccctcccgtatcgtagttatctacacgacggggagtcaggcaactatggatgaacgaaatagacagatcgctgagataggtgcctcactgattaagcattgg

SEQ ID NO: 92 - DNA, 20 bp, Artificial Sequence
  Description of Artificial Sequence: Synthetic oligonucleotide
gcgcgctccacacaactcac

SEQ ID NO: 93 - DNA, 20 bp, Artificial Sequence
  Description of Artificial Sequence: Synthetic oligonucleotide
gcaaaaatagacaatcagca

SEQ ID NO: 94 - DNA, 20 bp, Artificial Sequence
  Description of Artificial Sequence: Synthetic oligonucleotide
gaaggatctcggccaatttg

SEQ ID NO: 95 - DNA, 20 bp, Artificial Sequence
  Description of Artificial Sequence: Synthetic oligonucleotide
gctgccgggttttgcatgaa

SEQ ID NO: 96 - DNA, 20 bp, Artificial Sequence
  Description of Artificial Sequence: Synthetic oligonucleotide
ccgggcccgcagcaaacttc

SEQ ID NO: 97 - DNA, 20 bp, Artificial Sequence
  Description of Artificial Sequence: Synthetic oligonucleotide
ggggctgtcagggaataaat

SEQ ID NO: 98 - DNA, 20 bp, Artificial Sequence
  Description of Artificial Sequence: Synthetic primer
ctgtgctgaaggatctgggg

SEQ ID NO: 99 - DNA, 20 bp, Artificial Sequence
  Description of Artificial Sequence: Synthetic primer
atgctgcaggcataggacaa

SEQ ID NO: 100 - DNA, 21 bp, Artificial Sequence
  Description of Artificial Sequence: Synthetic primer
gagggggagagggactaaaga

SEQ ID NO: 101 - DNA, 19 bp, Artificial Sequence
  Description of Artificial Sequence: Synthetic primer
gctctccctccccagctta

SEQ ID NO: 102 - DNA, 14 bp, Mus sp.
tatctgaactctcc

SEQ ID NO: 103 - DNA, 14 bp, Mus sp.
tgtctgtcttgcat

SEQ ID NO: 104 - DNA, 14 bp, Mus sp.
tggctgttgccagg

SEQ ID NO: 105 - DNA, 14 bp, Mus sp.
tacctggagctagc

SEQ ID NO: 106 - DNA, 14 bp, Mus sp.
tacacaggatgtcc

SEQ ID NO: 107 - DNA, 14 bp, Mus sp.
ttggccctgtgcag

SEQ ID NO: 108 - DNA, 14 bp, Mus sp.
tagcgcagcgatcg

SEQ ID NO: 109 - DNA, 14 bp, Mus sp.
tattgccaagagag

SEQ ID NO: 110 - DNA, 14 bp, Mus sp.
tgactggaacatac

SEQ ID NO: 111 - DNA, 14 bp, Mus sp.
tgatggacttgtat

SEQ ID NO: 112 - DNA, 14 bp, Mus sp.
tggaccttctccct

SEQ ID NO: 113 - DNA, 14 bp, Mus sp.
taggtctcctggag

SEQ ID NO: 114 - DNA, 14 bp, Mus sp.
tggctcaggaactt

SEQ ID NO: 115 - DNA, 14 bp, Mus sp.
ttctctaagctgcc

SEQ ID NO: 116 - DNA, 14 bp, Mus sp.
tgagccctggagga

SEQ ID NO: 117 - DNA, 14 bp, Mus sp.
tgcctaagatggag

SEQ ID NO: 118 - DNA, 14 bp, Mus sp.
tgtagtgagtgttc

SEQ ID NO: 119 - DNA, 14 bp, Mus sp.
tgtctaggtgatgt

SEQ ID NO: 120 - DNA, 14 bp, Mus sp.
tctctgctagaagg

SEQ ID NO: 121 - DNA, 14 bp, Mus sp.
tctaggtcaagtgt

SEQ ID NO: 122 - DNA, 14 bp, Mus sp.
tcctctgctccgct

SEQ ID NO: 123 - DNA, 14 bp, Mus sp.
tctaggagtgtagc

SEQ ID NO: 124 - DNA, 14 bp, Mus sp.
tgcctggctgctgg

SEQ ID NO: 125 - DNA, 14 bp, Mus sp.
tatctgaactctcc

SEQ ID NO: 126 - DNA, 14 bp, Mus sp.
tcagagctgtcctc

SEQ ID NO: 127 - DNA, 14 bp, Mus sp.
tgcaagagtaggag

SEQ ID NO: 128 - DNA, 14 bp, Mus sp.
tagtgactgattcc

SEQ ID NO: 129 - DNA, 14 bp, Mus sp.
ttggaggagcacca

SEQ ID NO: 130 - DNA, 16 bp, Mus sp.
tgaatgatgataatac

SEQ ID NO: 131 - protein, 4 aa, Artificial Sequence
  Description of Artificial Sequence: Synthetic peptide
GGSG

SEQ ID NO: 132 - protein, 1603 aa, Artificial Sequence
  Description of Artificial Sequence: Synthetic polypeptide
MSRTRLPSPPAPSPAFSADSFSDLLRQFDPSLFNTSLFDSLPPFGAHHTEAATGEWDEVQSGLRAADAPPPTMRVAVTAARPPRAKPAPRRRAAQPSDASPAAQVDLRTLGYSQQQQEKIKPKVRSTVAQHHEALVGHGFTHAHIVALSQHPAALGTVAVKYQDMIAALPEATHEAIVGVGKQWSGARALEALLTVAGELRGPPLQLDTGQLLKIAKRGGVTAVEAVHAWRNALTGAPLNLTPEQVVAIASNNGGKQALETVQRLLPVLCQAHGLTPEQVVAIASNGGGKQALETVQRLLPVLCQAHGLTPEQVVAIASNNGGKQALETVQRLLPVLCQAHGLTPEQVVAIASNIGGKQALETVQRLLPVLCQAHGLTPEQVVAIASNIGGKQALETVQRLLPVLCQAHGLTPEQVVAIASNGGGKQALETVQRLLPVLCQAHGLTPEQVVAIASNNGGKQALETVQRLLPVLCQAHGLTPEQVVAIASNIGGKQALETVQRLLPVLCQAHGLTPEQVVAIASNGGGKQALETVQRLLPVLCQAHGLTPEQVVAIASNNGGKQALETVQRLLPVLCQAHGLTPEQVVAIASNIGGKQALETVQRLLPVLCQAHGLTPEQVVAIASNGGGKQALETVQRLLPVLCQAHGLTPEQVVAIASNIGGKQALETVQRLLPVLCQAHGLTPEQVVAIASNIGGKQALETVQRLLPVLCQAHGLTPEQVVAIASNGGGKQALETVQRLLPVLCQAHGLTPEQVVAIASNIGGKQALETVQRLLPVLCQAHGLTPEQVVAIASHDGGRPALESIVAQLSRPDPALAALTNDHLVALACLGGRPALDAVKKGLPHAPALIKRTNRRIPERTSHRVADHAQVVRVLGFFQCHSHPAQAFDDAMTQFGMSRHGLLQLFRRVGVTELEARSGTLPPASQRWDRILQASGMKRAKPSPTSTQTPDQASLHAFADSLERDLDAPSPMHEGDQTRASASPKKKRKVEASKMDKKTIVWFRRDLRIEDNPALAAAAHEGSVFPVFIWCPEEEGQFYPGRASRWWMKQSLAHLSQSLKALGSDLTLIKTHNTISAILDCIRVTGATKVVFNHLYDPVSLVRDHTVKEKLVERGISVQSYNGDLLYEPWEIYCEKGKPFTSFNSYWKKCLDMSIESVMLPPPWRLMPITAAAEAIWACSIEELGLENEAEKPSNALLTRAWSPGWSNADKLLNEFIEKQLIDYAKNSKKVVGNSTSLLSPYLHFGEISVRHVFQCARMKQIIWARDKNSEGEESADLFLRGIGLREYSRYICFNFPFTHEQSLLSHLRFFPWDADVDKFKAWRQGRTGYPLVDAGMRELWATGWMHNRIRVIVSSFAVKFLLLPWKWGMKYFWDTLLDADLECDILGWQYISGSIPDGHELDRLDNPALQGAKYDPEGEYIRQWLPELARLPTEWIHHPWDAPLTVLKASGVELGTNYAKPIVDIDTARELLAKAISRTREAQIMIGAAPDEIVADSFEALGANTIKEPGLCPSVSSNDQQVPSAVRYNGSKRVKPEEEEERDMKKSRGFDERELFSTAESSSSSSVFFVSQSCSLASEGKNLEGIQDSSDQITTSLGKNG

SEQ ID NO: 133 - protein, 1492 aa, Artificial Sequence
  Description of Artificial Sequence: Synthetic polypeptide
MSRTRLPSPPAPSPAFSADSFSDLLRQFDPSLFNTSLFDSLPPFGAHHTEAATGEWDEVQSGLRAADAPPPTMRVAVTAARPPRAKPAPRRRAAQPSDASPAAQVDLRTLGYSQQQQEKIKPKVRSTVAQHHEALVGHGFTHAHIVALSQHPAALGTVAVKYQDMIAALPEATHEAIVGVGKQWSGARALEALLTVAGELRGPPLQLDTGQLLKIAKRGGVTAVEAVHAWRNALTGAPLNLTPEQVVAIASNNGGKQALETVQRLLPVLCQAHGLTPEQVVAIASNGGGKQALETVQRLLPVLCQAHGLTPEQVVAIASNNGGKQALETVQRLLPVLCQAHGLTPEQVVAIASNIGGKQALETVQRLLPVLCQAHGLTPEQVVAIASNIGGKQALETVQRLLPVLCQAHGLTPEQVVAIASNGGGKQALETVQRLLPVLCQAHGLTPEQVVAIASNNGGKQALETVQRLLPVLCQAHGLTPEQVVAIASNIGGKQALETVQRLLPVLCQAHGLTPEQVVAIASNGGGKQALETVQRLLPVLCQAHGLTPEQVVAIASNNGGKQALETVQRLLPVLCQAHGLTPEQVVAIASNIGGKQALETVQRLLPVLCQAHGLTPEQVVAIASNGGGKQALETVQRLLPVLCQAHGLTPEQVVAIASNIGGKQALETVQRLLPVLCQAHGLTPEQVVAIASNIGGKQALETVQRLLPVLCQAHGLTPEQVVAIASNGGGKQALETVQRLLPVLCQAHGLTPEQVVAIASNIGGKQALETVQRLLPVLCQAHGLTPEQVVAIASHDGGRPALESIVAQLSRPDPALAALTNDHLVALACLGGRPALDAVKKGLPHAPALIKRTNRRIPERTSHRVADHAQVVRVLGFFQCHSHPAQAFDDAMTQFGMSRHGLLQLFRRVGVTELEARSGTLPPASQRWDRILQASGMKRAKPSPTSTQTPDQASLHAFADSLERDLDAPSPMHEGDQTRASASPKKKRKVEASKMDKKTIVWFRRDLRIEDNPALAAAAHEGSVFPVFIWCPEEEGQFYPGRASRWWMKQSLAHLSQSLKALGSDLTLIKTHNTISAILDCIRVTGATKVVFNHLYDPVSLVRDHTVKEKLVERGISVQSYNGDLLYEPWEIYCEKGKPFTSFNSYWKKCLDMSIESVMLPPPWRLMPITAAAEAIWACSIEELGLENEAEKPSNALLTRAWSPGWSNADKLLNEFIEKQLIDYAKNSKKVVGNSTSLLSPYLHFGEISVRHVFQCARMKQIIWARDKNSEGEESADLFLRGIGLREYSRYICFNFPFTHEQSLLSHLRFFPWDADVDKFKAWRQGRTGYPLVDAGMRELWATGWMHNRIRVIVSSFAVKFLLLPWKWGMKYFWDTLLDADLECDILGWQYISGSIPDGHELDRLDNPALQGAKYDPEGEYIRQWLPELARLPTEWIHHPWDAPLTVLKASGVELGTNYAKPIVDIDTARELLAKAISRTREAQIMIGAAP

SEQ ID NO: 134 - protein, 665 aa, Artificial Sequence
  Description of Artificial Sequence: Synthetic polypeptide
MNGAIGGDLLLNFPDMSVLERQRAHLKYLNPTFDSPLAGFFADSSMITGGEMDSYLSTAGLNLPMMYGETTVEGDSRLSISPETTLGTGNFKKRKFDTETKDCNEKKKKMTMNRDDLVEEGEEEKSKITEQNNGSTKSIKKMKHKAKKEENNFSNDSSKVTKELEKTDYIHVRARRGQATDSHSIAERVRREKISERMKFLQDLVPGCDKITGKAGMLDEIINYVQSLQRQIEFLSMKLAIVNPRPDFDMDDIFAKEVASTPMTVVPSPEMVLSGYSHEMVHSGYSSEMVNSGYLHVNPMQQVNTSSDPLSCFNNGEAPSMWDSHVQNLYGNLGVASPKKKRKVEASGSGRADALDDFDLDMLGSDALDDFDLDMLGSDALDDFDLDMLGSDALDDFDLDMLINSRGSGEGRGSLLTCGDVEENPGPVSKGEELFTGVVPILVELDGDVNGHKFSVSGEGEGDATYGKLTLKFICTTGKLPVPWPTLVTTLTYGVQCFSRYPDHMKQHDFFKSAMPEGYVQERTIFFKDDGNYKTRAEVKFEGDTLVNRIELKGIDFKEDGNILGHKLEYNYNSHNVYIMADKQKNGIKVNFKIRHNIEDGSVQLADHYQQNTPIGDGPVLLPDNHYLSTQSALSKDPNEKRDHMVLLEFVTAAGITLGMDELYK

SEQ ID NO: 135 - protein, 500 aa, Artificial Sequence
  Description of Artificial Sequence: Synthetic polypeptide
MNGAIGGDLLLNFPDMSVLERQRAHLKYLNPTFDSPLAGFFADSSMITGGEMDSYLSTAGLNLPMMYGETTVEGDSRLSISPETTLGTGNFKKRKFDTETKDCNEKKKKMTMNRDDLVEEGEEEKSKITEQNNGSTKSIKKMKHKAKKEENNFSNDSSKVTKELEKTDYIASPKKKRKVEASGSGRADALDDFDLDMLGSDALDDFDLDMLGSDALDDFDLDMLGSDALDDFDLDMLINSRGSGEGRGSLLTCGDVEENPGPVSKGEELFTGVVPILVELDGDVNGHKFSVSGEGEGDATYGKLTLKFICTTGKLPVPWPTLVTTLTYGVQCFSRYPDHMKQHDFFKSAMPEGYVQERTIFFKDDGNYKTRAEVKFEGDTLVNRIELKGIDFKEDGNILGHKLEYNYNSHNVYIMADKQKNGIKVNFKIRHNIEDGSVQLADHYQQNTPIGDGPVLLPDNHYLSTQSALSKDPNEKRDHMVLLEFVTAAGITLGMDELYK

SEQ ID NO: 136 - protein, 693 aa, Artificial Sequence
  Description of Artificial Sequence: Synthetic polypeptide
MNGAIGGDLLLNFPDMSVLERQRAHLKYLNPTFDSPLAGFFADSSMITGGEMDSYLSTAGLNLPMMYGETTVEGDSRLSISPETTLGTGNFKKRKFDTETKDCNEKKKKMTMNRDDLVEEGEEEKSKITEQNNGSTKSIKKMKHKAKKEENNFSNDSSKVTKELEKTDYIHVRARRGQATDSHSIAERVRREKISERMKFLQDLVPGCDKITGKAGMLDEIINYVQSLQRQIEFLSMKLAIVNPRPDFDMDDIFAKEVASTPMTVVPSPEMVLSGYSHEMVHSGYSSEMVNSGYLHVNPMQQVNTSSDPLSCFNNGEAPSMWDSHVQNLYGNLGVASPKKKRKVEASAPPTDVSLGDELHLDGEDVAMAHADALDDFDLDMLGDGDSPGPGFTPHDSAPYGALDMADFEFEQMFTDALGIDEYGGEFPGIRRSRGSGEGRGSLLTCGDVEENPGPVSKGEELFTGVVPILVELDGDVNGHKFSVSGEGEGDATYGKLTLKFICTTGKLPVPWPTLVTTLTYGVQCFSRYPDHMKQHDFFKSAMPEGYVQERTIFFKDDGNYKTRAEVKFEGDTLVNRIELKGIDFKEDGNILGHKLEYNYNSHNVYIMADKQKNGIKVNFKIRHNIEDGSVQLADHYQQNTPIGDGPVLLPDNHYLSTQSALSKDPNEKRDHMVLLEFVTAAGITLGMDELYK

SEQ ID NO: 137 - protein, 792 aa, Artificial Sequence
  Description of Artificial Sequence: Synthetic polypeptide
MNGAIGGDLLLNFPDMSVLERQRAHLKYLNPTFDSPLAGFFADSSMITGGEMDSYLSTAGLNLPMMYGETTVEGDSRLSISPETTLGTGNFKKRKFDTETKDCNEKKKKMTMNRDDLVEEGEEEKSKITEQNNGSTKSIKKMKHKAKKEENNFSNDSSKVTKELEKTDYIHVRARRGQATDSHSIAERVRREKISERMKFLQDLVPGCDKITGKAGMLDEIINYVQSLQRQIEFLSMKLAIVNPRPDFDMDDIFAKEVASTPMTVVPSPEMVLSGYSHEMVHSGYSSEMVNSGYLHVNPMQQVNTSSDPLSCFNNGEAPSMWDSHVQNLYGNLGVASPKKKRKVEASPSGQISNQALALAPSSAPVLAQTMVPSSAMVPLAQPPAPAPVLTPGPPQSLSAPVPKSTQAGEGTLSEALLHLQFDADEDLGALLGNSTDPGVFTDLASVDNSEFQQLLNQGVSMSHSTAEPMLMEYPEAITRLVTGSQRPPDPAPTPLGTSGLPNGLSGDEDFSSIADMDFSALLSQISSSGQSRGSGEGRGSLLTCGDVEENPGPVSKGEELFTGVVPILVELDGDVNGHKFSVSGEGEGDATYGKLTLKFICTTGKLPVPWPTLVTTLTYGVQCFSRYPDHMKQHDFFKSAMPEGYVQERTIFFKDDGNYKTRAEVKFEGDTLVNRIELKGIDFKEDGNILGHKLEYNYNSHNVYIMADKQKNGIKVNFKIRHNIEDGSVQLADHYQQNTPIGDGPVLLPDNHYLSTQSALSKDPNEKRDHMVLLEFVTAAGITLGMDELYK

SEQ ID NO: 138 - protein, 967 aa, Artificial Sequence
  Description of Artificial Sequence: Synthetic polypeptide
  MOD_RES (158)..(159): Any amino acid
  MOD_RES (192)..(193): Any amino acid
  MOD_RES (226)..(227): Any amino acid
  MOD_RES (260)..(261): Any amino acid
  MOD_RES (294)..(295): Any amino acid
  MOD_RES (328)..(329): Any amino acid
  MOD_RES (362)..(363): Any amino acid
  MOD_RES (396)..(397): Any amino acid
  MOD_RES (430)..(431): Any amino acid
  MOD_RES (464)..(465): Any amino acid
  MOD_RES (498)..(499): Any amino acid
  MOD_RES (532)..(533): Any amino acid
  MOD_RES (566)..(567): Any amino acid
MYPYDVPDYAVDLRTLGYSQQQQEKIKPKVRSTVAQHHEALVGHGFTHAHIVALSQHPAALGTVAVKYQDMIAALPEATHEAIVGVGKQWSGARALEALLTVAGELRGPPLQLDTGQLLKIAKRGGVTAVEAVHAWRNALTGAPLNLTPEQVVAIASXXGGKQALETVQRLLPVLCQAHGLTPEQVVAIASXXGGKQALETVQRLLPVLCQAHGLTPEQVVAIASXXGGKQALETVQRLLPVLCQAHGLTPEQVVAIASXXGGKQALETVQRLLPVLCQAHGLTPEQVVAIASXXGGKQALETVQRLLPVLCQAHGLTPEQVVAIASXXGGKQALETVQRLLPVLCQAHGLTPEQVVAIASXXGGKQALETVQRLLPVLCQAHGLTPEQVVAIASXXGGKQALETVQRLLPVLCQAHGLTPEQVVAIASXXGGKQALETVQRLLPVLCQAHGLTPEQVVAIASXXGGKQALETVQRLLPVLCQAHGLTPEQVVAIASXXGGKQALETVQRLLPVLCQAHGLTPEQVVAIASXXGGKQALETVQRLLPVLCQAHGLTPEQVVAIASXXGGRPALESIVAQLSRPDPALAALTNDHLVALACLGGRPALDAVKKGLPHAPALIKRTNRRIPERTSHRVAASPKKKRKVEASGSGRADALDDFDLDMLGSDALDDFDLDMLGSDALDDFDLDMLGSDALDDFDLDMLINSRGSGEGRGSLLTCGDVEENPGPVSKGEELFTGVVPILVELDGDVNGHKFSVSGEGEGDATYGKLTLKFICTTGKLPVPWPTLVTTLTYGVQCFSRYPDHMKQHDFFKSAMPEGYVQERTIFFKDDGNYKTRAEVKFEGDTLVNRIELKGIDFKEDGNILGHKLEYNYNSHNVYIMADKQKNGIKVNFKIRHNIEDGSVQLADHYQQNTPIGDGPVLLPDNHYLSTQSALSKDPNEKRDHMVLLEFVTAAGITLGMDELYK

SEQ ID NO: 139 - protein, 922 aa, Artificial Sequence
  Description of Artificial Sequence: Synthetic polypeptide
  MOD_RES (158)..(159): Any amino acid
  MOD_RES (192)..(193): Any amino acid
  MOD_RES (226)..(227): Any amino acid
  MOD_RES (260)..(261): Any amino acid
  MOD_RES (294)..(295): Any amino acid
  MOD_RES (328)..(329): Any amino acid
  MOD_RES (362)..(363): Any amino acid
  MOD_RES (396)..(397): Any amino acid
  MOD_RES (430)..(431): Any amino acid
  MOD_RES (464)..(465): Any amino acid
  MOD_RES (498)..(499): Any amino acid
  MOD_RES (532)..(533): Any amino acid
  MOD_RES (566)..(567): Any amino acid
MYPYDVPDYAVDLRTLGYSQQQQEKIKPKVRSTVAQHHEALVGHGFTHAHIVALSQHPAALGTVAVKYQDMIAALPEATHEAIVGVGKQWSGARALEALLTVAGELRGPPLQLDTGQLLKIAKRGGVTAVEAVHAWRNALTGAPLNLTPEQVVAIASXXGGKQALETVQRLLPVLCQAHGLTPEQVVAIASXXGGKQALETVQRLLPVLCQAHGLTPEQVVAIASXXGGKQALETVQRLLPVLCQAHGLTPEQVVAIASXXGGKQALETVQRLLPVLCQAHGLTPEQVVAIASXXGGKQALETVQRLLPVLCQAHGLTPEQVVAIASXXGGKQALETVQRLLPVLCQAHGLTPEQVVAIASXXGGKQALETVQRLLPVLCQAHGLTPEQVVAIASXXGGKQALETVQRLLPVLCQAHGLTPEQVVAIASXXGGKQALETVQRLLPVLCQAHGLTPEQVVAIASXXGGKQALETVQRLLPVLCQAHGLTPEQVVAIASXXGGKQALETVQRLLPVLCQAHGLTPEQVVAIASXXGGKQALETVQRLLPVLCQAHGLTPEQVVAIASXXGGRPALESIVAQLSRPDPALAALTNDHLVALACLGGRPALDAVKKGLPHAPALIKRTNRRIPERTSHRVAASPKKKRKVEASPKKKRKVEASGSGMNIQMLLEAADYLERREREAEHGYASMLPGSGMNIQMLLEAADYLERREREAEHGYASMLPGSGMNIQMLLEAADYLERREREAEHGYASMLPGSGMNIQMLLEAADYLERREREAEHGYASMLPSRSRGSGEGRGSLLTCGDVEENPGPIEKSFVITDPRLPDYPIIFASDGFLELTEYSREEIMGRNARFLQGPETDQATVQKIRDAIRDQRETTVQLINYTKSGKKFWNLLHLQPVRDRKGGLQYFIGVQLVGSDHV

SEQ ID NO: 140 - protein, 983 aa, Artificial Sequence
  Description of Artificial Sequence: Synthetic polypeptide
  MOD_RES (158)..(159): Any amino acid
  MOD_RES (192)..(193): Any amino acid
  MOD_RES (226)..(227): Any amino acid
  MOD_RES (260)..(261): Any amino acid
  MOD_RES (294)..(295): Any amino acid
  MOD_RES (328)..(329): Any amino acid
  MOD_RES (362)..(363): Any amino acid
  MOD_RES (396)..(397): Any amino acid
  MOD_RES (430)..(431): Any amino acid
  MOD_RES (464)..(465): Any amino acid
  MOD_RES (498)..(499): Any amino acid
  MOD_RES (532)..(533): Any amino acid
  MOD_RES (566)..(567): Any amino acid
MYPYDVPDYAVDLRTLGYSQQQQEKIKPKVRSTVAQHHEALVGHGFTHAHIVALSQHPAALGTVAVKYQDMIAALPEATHEAIVGVGKQWSGARALEALLTVAGELRGPPLQLDTGQLLKIAKRGGVTAVEAVHAWRNALTGAPLNLTPEQVVAIASXXGGKQALETVQRLLPVLCQAHGLTPEQVVAIASXXGGKQALETVQRLLPVLCQAHGLTPEQVVAIASXXGGKQALETVQRLLPVLCQAHGLTPEQVVAIASXXGGKQALETVQRLLPVLCQAHGLTPEQVVAIASXXGGKQALETVQRLLPVLCQAHGLTPEQVVAIASXXGGKQALETVQRLLPVLCQAHGLTPEQVVAIASXXGGKQALETVQRLLPVLCQAHGLTPEQVVAIASXXGGKQALETVQRLLPVLCQAHGLTPEQVVAIASXXGGKQALETVQRLLPVLCQAHGLTPEQVVAIASXXGGKQALETVQRLLPVLCQAHGLTPEQVVAIASXXGGKQALETVQRLLPVLCQAHGLTPEQVVAIASXXGGKQALETVQRLLPVLCQAHGLTPEQVVAIASXXGGRPALESIVAQLSRPDPALAALTNDHLVALACLGGRPALDAVKKGLPHAPALIKRTNRRIPERTSHRVAASPKKKRKVEASNGAIGGDLLLNFPDMSVLERQRAHLKYLNPTFDSPLAGFFADSSMITGGEMDSYLSTAGLNLPMMYGETTVEGDSRLSISPETTLGTGNFKKRKFDTETKDCNEKKKKMTMNRDDLVEEGEEEKSKITEQNNGSTKSIKKMKHKAKKEENNFSNDSSKVTKELEKTDYIHVRARRGQATDSHSIAERVRREKISERMKFLQDLVPGCDKITGKAGMLDEIINYVQSLQRQIEFLSMKLAIVNPRPDFDMDDIFAKEVASTPMTVVPSPEMVLSGYSHEMVHSGYSSEMVNSGYLHVNPMQQVNTSSDPLSCFNNGEAPSMWDSHVQNLYGNLGV

SEQ ID NO: 141 - protein, 830 aa, Artificial Sequence
  Description of Artificial Sequence: Synthetic polypeptide
MKMDKKTIVWFRRDLRIEDNPALAAAAHEGSVFPVFIWCPEEEGQFYPGRASRWWMKQSLAHLSQSLKALGSDLTLIKTHNTISAILDCIRVTGATKVVFNHLYDPVSLVRDHTVKEKLVERGISVQSYNGDLLYEPWEIYCEKGKPFTSFNSYWKKCLDMSIESVMLPPPWRLMPITAAAEAIWACSIEELGLENEAEKPSNALLTRAWSPGWSNADKLLNEFIEKQLIDYAKNSKKVVGNSTSLLSPYLHFGEISVRHVFQCARMKQIIWARDKNSEGEESADLFLRGIGLREYSRYICFNFPFTHEQSLLSHLRFFPWDADVDKFKAWRQGRTGYPLVDAGMRELWATGWMHNRIRVIVSSFAVKFLLLPWKWGMKYFWDTLLDADLECDILGWQYISGSIPDGHELDRLDNPALQGAKYDPEGEYIRQWLPELARLPTEWIHHPWDAPLTVLKASGVELGTNYAKPIVDIDTARELLAKAISRTREAQIMIGAAPASPKKKRKVEASGSGRADALDDFDLDMLGSDALDDFDLDMLGSDALDDFDLDMLGSDALDDFDLDMLINSRGSGEGRGSLLTCGDVEENPGPVSKGEELFTGVVPILVELDGDVNGHKFSVSGEGEGDATYGKLTLKFICTTGKLPVPWPTLVTTLTYGVQCFSRYPDHMKQHDFFKSAMPEGYVQERTIFFKDDGNYKTRAEVKFEGDTLVNRIELKGIDFKEDGNILGHKLEYNYNSHNVYIMADKQKNGIKVNFKIRHNIEDGSVQLADHYQQNTPIGDGPVLLPDNHYLSTQSALSKDPNEKRDHMVLLEFVTAAGITLGMDELYKV

SEQ ID NO: 142 - protein, 774 aa, Artificial Sequence
  Description of Artificial Sequence: Synthetic polypeptide
MKMDKKTIVWFRRDLRIEDNPALAAAAHEGSVFPVFIWCPEEEGQFYPGRASRWWMKQSLAHLSQSLKALGSDLTLIKTHNTISAILDCIRVTGATKVVFNHLYDPVSLVRDHTVKEKLVERGISVQSYNGDLLYEPWEIYCEKGKPFTSFNSYWKKCLDMSIESVMLPPPWRLMPITAAAEAIWACSIEELGLENEAEKPSNALLTRAWSPGWSNADKLLNEFIEKQLIDYAKNSKKVVGNSTSLLSPYLHFGEISVRHVFQCARMKQIIWARDKNSEGEESADLFLRGIGLREYSRYICFNFPFTHEQSLLSHLRFFPWDADVDKFKAWRQGRTGYPLVDAGMRELWATGWMHNRIRVIVSSFAVKFLLLPWKWGMKYFWDTLLDADLECDILGWQYISGSIPDGHELDRLDNPALQGAKYDPEGEYIRQWLPELARLPTEWIHHPWDAPLTVLKASGVELGTNYAKPIVDIDTARELLAKAISRTREAQIMIGAAPASPKKKRKVEASGSGMNIQMLLEAADYLERREREAEHGYASMLPGSGMNIQMLLEAADYLERREREAEHGYASMLPGSGMNIQMLLEAADYLERREREAEHGYASMLPGSGMNIQMLLEAADYLERREREAEHGYASMLPSRSRGSGEGRGSLLTCGDVEENPGPIEKSFVITDPRLPDYPIIFASDGFLELTEYSREEIMGRNARFLQGPETDQATVQKIRDAIRDQRETTVQLINYTKSGKKFWNLLHLQPVRDRKGGLQYFIGVQLVGSDHV

SEQ ID NO: 143 - protein, 1356 aa, Artificial Sequence
  Description of Artificial Sequence: Synthetic polypeptide
MSRTRLPSPPAPSPAFSADSFSDLLRQFDPSLFNTSLFDSLPPFGAHHTEAATGEWDEVQSGLRAADAPPPTMRVAVTAARPPRAKPAPRRRAAQPSDASPAAQVDLRTLGYSQQQQEKIKPKVRSTVAQHHEALVGHGFTHAHIVALSQHPAALGTVAVKYQDMIAALPEATHEAIVGVGKQWSGARALEALLTVAGELRGPPLQLDTGQLLKIAKRGGVTAVEAVHAWRNALTGAPLNLTPEQVVAIASNGGGKQALETVQRLLPVLCQAHGLTPEQVVAIASHDGGKQALETVQRLLPVLCQAHGLTPEQVVAIASNGGGKQALETVQRLLPVLCQAHGLTPEQVVAIASNGGGKQALETVQRLLPVLCQAHGLTPEQVVAIASNIGGKQALETVQRLLPVLCQAHGLTPEQVVAIASHDGGKQALETVQRLLPVLCQAHGLTPEQVVAIASNGGGKQALETVQRLLPVLCQAHGLTPEQVVAIASNGGGKQALETVQRLLPVLCQAHGLTPEQVVAIASNIGGKQALETVQRLLPVLCQAHGLTPEQVVAIASNGGGKQALETVQRLLPVLCQAHGLTPEQVVAIASNIGGKQALETVQRLLPVLCQAHGLTPEQVVAIASNIGGKQALETVQRLLPVLCQAHGLTPEQVVAIASHDGGRPALESIVAQLSRPDPALAALTNDHLVALACLGGRPALDAVKKGLPHAPALIKRTNRRIPERTSHRVADHAQVVRVLGFFQCHSHPAQAFDDAMTQFGMSRHGLLQLFRRVGVTELEARSGTLPPASQRWDRILQASGMKRAKPSPTSTQTPDQASLHAFADSLERDLDAPSPMHEGDQTRASASPKKKRKVEASKMDKKTIVWFRRDLRIEDNPALAAAAHEGSVFPVFIWCPEEEGQFYPGRASRWWMKQSLAHLSQSLKALGSDLTLIKTHNTISAILDCIRVTGATKVVFNHLYDPVSLVRDHTVKEKLVERGISVQSYNGDLLYEPWEIYCEKGKPFTSFNSYWKKCLDMSIESVMLPPPWRLMPITAAAEAIWACSIEELGLENEAEKPSNALLTRAWSPGWSNADKLLNEFIEKQLIDYAKNSKKVVGNSTSLLSPYLHFGEISVRHVFQCARMKQIIWARDKNSEGEESADLFLRGIGLREYSRYICFNFPFTHEQSLLSHLRFFPWDADVDKFKAWRQGRTGYPLVDAGMRELWATGWMHNRIRVIVSSFAVKFLLLPWKWGMKYFWDTLLDADLECDILGWQYISGSIPDGHELDRLDNPALQGAKYDPEGEYIRQWLPELARLPTEWIHHPWDAPLTVLKASGVELGTNYAKPIVDIDTARELLAKAISRTREAQIMIGAAP

SEQ ID NO: 144 - protein, 1001 aa, Artificial Sequence
  Description of Artificial Sequence: Synthetic polypeptide
MYPYDVPDYASPKKKRKVEASVDLRTLGYSQQQQEKIKPKVRSTVAQHHEALVGHGFTHAHIVALSQHPAALGTVAVKYQDMIAALPEATHEAIVGVGKQWSGARALEALLTVAGELRGPPLQLDTGQLLKIAKRGGVTAVEAVHAWRNALTGAPLNLTPEQVVAIASNNGGKQALETVQRLLPVLCQAHGLTPEQVVAIASHDGGKQALETVQRLLPVLCQAHGLTPEQVVAIASHDGGKQALETVQRLLPVLCQAHGLTPEQVVAIASNGGGKQALETVQRLLPVLCQAHGLTPEQVVAIASNNGGKQALETVQRLLPVLCQAHGLTPEQVVAIASHDGGKQALETVQRLLPVLCQAHGLTPEQVVAIASHDGGKQALETVQRLLPVLCQAHGLTPEQVVAIASHDGGKQALETVQRLLPVLCQAHGLTPEQVVAIASNGGGKQALETVQRLLPVLCQAHGLTPEQVVAIASHDGGKQALETVQRLLPVLCQAHGLTPEQVVAIASHDGGKQALETVQRLLPVLCQAHGLTPEQVVAIASNIGGKQALETVQRLLPVLCQAHGLTPEQVVAIASNNGGKQALETVQRLLPVLCQAHGLTPEQVVAIASNNGGKQALETVQRLLPVLCQAHGLTPEQVVAIASHDGGKQALETVQRLLPVLCQAHGLTPEQVVAIASNGGGKQALETVQRLLPVLCQAHGLTPEQVVAIASHDGGKQALETVQRLLPVLCQAHGLTPEQVVAIASHDGGKQALETVQRLLPVLCQAHGLTPEQVVAIASHDGGRPALESIVAQLSRPDPALAALTNDHLVALACLGGRPALDAVKKGLPHAPALIKRTNRRIPERTSHRVADHAQVVRVLGFFQCHSHPAQAFDDAMTQFGMSRHGLLQLFRRVGVTELEARSGTLPPASQRWDRILQASGMKRAKPSPTSTQTPDQASLHAFADSLERDLDAPSPMHEGDQTRASASGSGMNIQMLLEAADYLERREREAEHGYASMLP

SEQ ID NO: 145 - protein, 1099 aa, Artificial Sequence
  Description of Artificial Sequence: Synthetic polypeptide
MYPYDVPDYASPKKKRKVEASVDLRTLGYSQQQQEKIKPKVRSTVAQHHEALVGHGFTHAHIVALSQHPAALGTVAVKYQDMIAALPEATHEAIVGVGKQWSGARALEALLTVAGELRGPPLQLDTGQLLKIAKRGGVTAVEAVHAWRNALTGAPLNLTPEQVVAIASNNGGKQALETVQRLLPVLCQAHGLTPEQVVAIASHDGGKQALETVQRLLPVLCQAHGLTPEQVVAIASHDGGKQALETVQRLLPVLCQAHGLTPEQVVAIASNGGGKQALETVQRLLPVLCQAHGLTPEQVVAIASNNGGKQALETVQRLLPVLCQAHGLTPEQVVAIASHDGGKQALETVQRLLPVLCQAHGLTPEQVVAIASHDGGKQALETVQRLLPVLCQAHGLTPEQVVAIASHDGGKQALETVQRLLPVLCQAHGLTPEQVVAIASNGGGKQALETVQRLLPVLCQAHGLTPEQVVAIASHDGGKQALETVQRLLPVLCQAHGLTPEQVVAIASHDGGKQALETVQRLLPVLCQAHGLTPEQVVAIASNIGGKQALETVQRLLPVLCQAHGLTPEQVVAIASNNGGKQALETVQRLLPVLCQAHGLTPEQVVAIASNNGGKQALETVQRLLPVLCQAHGLTPEQVVAIASHDGGKQALETVQRLLPVLCQAHGLTPEQVVAIASNGGGKQALETVQRLLPVLCQAHGLTPEQVVAIASHDGGKQALETVQRLLPVLCQAHGLTPEQVVAIASHDGGKQALETVQRLLPVLCQAHGLTPEQVVAIASHDGGRPALESIVAQLSRPDPALAALTNDHLVALACLGGRPALDAVKKGLPHAPALIKRTNRRIPERTSHRVADHAQVVRVLGFFQCHSHPAQAFDDAMTQFGMSRHGLLQLFRRVGVTELEARSGTLPPASQRWDRILQASGMKRAKPSPTSTQTPDQASLHAFADSLERDLDAPSPMHEGDQTRASASGSGMNIQMLLEAADYLERREREAEHGYASMLPGSGMNIQMLLEAADYLERREREAEHGYASMLPGSGMNIQMLLEAADYLERREREAEHGYASMLPGSGMNIQMLLEAADYLERREREAEHGYASMLPSR

SEQ ID NO: 146 - protein, 1187 aa, Artificial Sequence
  Description of Artificial Sequence: Synthetic polypeptide
YPYDVPDYASRTRLPSPPAPSPAFSADSFSDLLRQFDPSLFNTSLFDSLPPFGAHHTEAATGEWDEVQSGLRAADAPPPTMRVAVTAARPPRAKPAPRRRAAQPSDASPAAQVDLRTLGYSQQQQEKIKPKVRSTVAQHHEALVGHGFTHAHIVALSQHPAALGTVAVKYQDMIAALPEATHEAIVGVGKQWSGARALEALLTVAGELRGPPLQLDTGQLLKIAKRGGVTAVEAVHAWRNALTGAPLNLTPEQVVAIASNGGGKQALETVQRLLPVLCQAHGLTPEQVVAIASNNGGKQALETVQRLLPVLCQAHGLTPEQVVAIASNIGGKQALETVQRLLPVLCQAHGLTPEQVVAIASNIGGKQALETVQRLLPVLCQAHGLTPEQVVAIASNGGGKQALETVQRLLPVLCQAHGLTPEQVVAIASNNGGKQALETVQRLLPVLCQAHGLTPEQVVAIASNIGGKQALETVQRLLPVLCQAHGLTPEQVVAIASNGGGKQALETVQRLLPVLCQAHGLTPEQVVAIASNNGGKQALETVQRLLPVLCQAHGLTPEQVVAIASNIGGKQALETVQRLLPVLCQAHGLTPEQVVAIASNGGGKQALETVQRLLPVLCQAHGLTPEQVVAIASNIGGKQALETVQRLLPVLCQAHGLTPEQVVAIASNIGGKQALETVQRLLPVLCQAHGLTPEQVVAIASNGGGKQALETVQRLLPVLCQAHGLTPEQVVAIASNIGGKQALETVQRLLPVLCQAHGLTPEQVVAIASHDGGRPALESIVAQLSRPDPALAALTNDHLVALACLGGRPALDAVKKGLPHAPALIKRTNRRIPERTSHRVAASGGGGSGGGGSNGAIGGDLLLNFPDMSVLERQRAHLKYLNPTFDSPLAGFFADSSMITGGEMDSYLSTAGLNLPMMYGETTVEGDSRLSISPETTLGTGNFKAAKFDTETKDCNEAAKKMTMNRDDLVEEGEEEKSKITEQNNGSTKSIKKMKHKAKKEENNFSNDSSKVTKELEKTDYIHVRARRGQATDSHSIAERVRREKISERMKFLQDLVPGCDKITGKAGMLDEIINYVQSLQRQIEFLSMKLAIVNPRPDFDMDDIFAKEVASTPMTVVPSPEMVLSGYSHEMVHSGYSSEMVNSGYLHVNPMQQVNTSSDPLSCFNNGEAPSMWDSHVQNLYGNLGV

SEQ ID NO: 147 - protein, 1188 aa, Artificial Sequence
  Description of Artificial Sequence: Synthetic polypeptide
YPYDVPDYASRTRLPSPPAPSPAFSADSFSDLLRQFDPSLFNTSLFDSLPPFGAHHTEAATGEWDEVQSGLRAADAPPPTMRVAVTAARPPRAKPAPRRRAAQPSDASPAAQVDLRTLGYSQQQQEKIKPKVRSTVAQHHEALVGHGFTHAHIVALSQHPAALGTVAVKYQDMIAALPEATHEAIVGVGKQWSGARALEALLTVAGELRGPPLQLDTGQLLKIAKRGGVTAVEAVHAWRNALTGAPLNLTPEQVVAIASNGGGKQALETVQRLLPVLCQAHGLTPEQVVAIASNNGGKQALETVQRLLPVLCQAHGLTPEQVVAIASNIGGKQALETVQRLLPVLCQAHGLTPEQVVAIASNIGGKQALETVQRLLPVLCQAHGLTPEQVVAIASNGGGKQALETVQRLLPVLCQAHGLTPEQVVAIASNNGGKQALETVQRLLPVLCQAHGLTPEQVVAIASNIGGKQALETVQRLLPVLCQAHGLTPEQVVAIASNGGGKQALETVQRLLPVLCQAHGLTPEQVVAIASNNGGKQALETVQRLLPVLCQAHGLTPEQVVAIASNIGGKQALETVQRLLPVLCQAHGLTPEQVVAIASNGGGKQALETVQRLLPVLCQAHGLTPEQVVAIASNIGGKQALETVQRLLPVLCQAHGLTPEQVVAIASNIGGKQALETVQRLLPVLCQAHGLTPEQVVAIASNGGGKQALETVQRLLPVLCQAHGLTPEQVVAIASNIGGKQALETVQRLLPVLCQAHGLTPEQVVAIASHDGGRPALESIVAQLSRPDPALAALTNDHLVALACLGGRPALDAVKKGLPHAPALIKRTNRRIPERTSHRVAASLYPERLRRILTNGAIGGDLLLNFPDMSVLERQRAHLKYLNPTFDSPLAGFFADSSMITGGEMDSYLSTAGLNLPMMYGETTVEGDSRLSISPETTLGTGNFKAAKFDTETKDCNEAAKKMTMNRDDLVEEGEEEKSKITEQNNGSTKSIKKMKHKAKKEENNFSNDSSKVTKELEKTDYIHVRARRGQATDSHSIAERVRREKISERMKFLQDLVPGCDKITGKAGMLDEIINYVQSLQRQIEFLSMKLAIVNPRPDFDMDDIFAKEVASTPMTVVPSPEMVLSGYSHEMVHSGYSSEMVNSGYLHVNPMQQVNTSSDPLSCFNNGEAPSMWDSHVQNLYGNLGV

SEQ ID NO: 148 - protein, 1188 aa, Artificial Sequence
  Description of Artificial Sequence: Synthetic polypeptide
YPYDVPDYASRTRLPSPPAPSPAFSADSFSDLLRQFDPSLFNTSLFDSLPPFGAHHTEAATGEWDEVQSGLRAADAPPPTMRVAVTAARPPRAKPAPRRRAAQPSDASPAAQVDLRTLGYSQQQQEKIKPKVRSTVAQHHEALVGHGFTHAHIVALSQHPAALGTVAVKYQDMIAALPEATHEAIVGVGKQWSGARALEALLTVAGELRGPPLQLDTGQLLKIAKRGGVTAVEAVHAWRNALTGAPLNLTPEQVVAIASNGGGKQALETVQRLLPVLCQAHGLTPEQVVAIASNNGGKQALETVQRLLPVLCQAHGLTPEQVVAIASNIGGKQALETVQRLLPVLCQAHGLTPEQVVAIASNIGGKQALETVQRLLPVLCQAHGLTPEQVVAIASNGGGKQALETVQRLLPVLCQAHGLTPEQVVAIASNNGGKQALETVQRLLPVLCQAHGLTPEQVVAIASNIGGKQALETVQRLLPVLCQAHGLTPEQVVAIASNGGGKQALETVQRLLPVLCQAHGLTPEQVVAIASNNGGKQALETVQRLLPVLCQAHGLTPEQVVAIASNIGGKQALETVQRLLPVLCQAHGLTPEQVVAIASNGGGKQALETVQRLLPVLCQAHGLTPEQVVAIASNIGGKQALETVQRLLPVLCQAHGLTPEQVVAIASNIGGKQALETVQRLLPVLCQAHGLTPEQVVAIASNGGGKQALETVQRLLPVLCQAHGLTPEQVVAIASNIGGKQALETVQRLLPVLCQAHGLTPEQVVAIASHDGGRPALESIVAQLSRPDPALAALTNDHLVALACLGGRPALDAVKKGLPHAPALIKRTNRRIPERTSHRVAASLQLPPLERLTLNGAIGGDLLLNFPDMSVLERQRAHLKYLNPTFDSPLAGFFADSSMITGGEMDSYLSTAGLNLPMMYGETTVEGDSRLSISPETTLGTGNFKAAKFDTETKDCNEAAKKMTMNRDDLVEEGEEEKSKITEQNNGSTKSIKKMKHKAKKEENNFSNDSSKVTKELEKTDYIHVRARRGQATDSHSIAERVRREKISERMKFLQDLVPGCDKITGKAGMLDEIINYVQSLQRQIEFLSMKLAIVNPRPDFDMDDIFAKEVASTPMTVVPSPEMVLSGYSHEMVHSGYSSEMVNSGYLHVNPMQQVNTSSDPLSCFNNGEAPSMWDSHVQNLYGNLGV

SEQ ID NO: 149 - protein, 1185 aa, Artificial Sequence
  Description of Artificial Sequence: Synthetic polypeptide
YPYDVPDYASRTRLPSPPAPSPAFSADSFSDLLRQFDPSLFNTSLFDSLPPFGAHHTEAATGEWDEVQSGLRAADAPPPTMRVAVTAARPPRAKPAPRRRAAQPSDASPAAQVDLRTLGYSQQQQEKIKPKVRSTVAQHHEALVGHGFTHAHIVALSQHPAALGTVAVKYQDMIAALPEATHEAIVGVGKQWSGARALEALLTVAGELRGPPLQLDTGQLLKIAKRGGVTAVEAVHAWRNALTGAPLNLTPEQVVAIASNGGGKQALETVQRLLPVLCQAHGLTPEQVVAIASNNGGKQALETVQRLLPVLCQAHGLTPEQVVAIASNIGGKQALETVQRLLPVLCQAHGLTPEQVVAIASNIGGKQALETVQRLLPVLCQAHGLTPEQVVAIASNGGGKQALETVQRLLPVLCQAHGLTPEQVVAIASNNGGKQALETVQRLLPVLCQAHGLTPEQVVAIASNIGGKQALETVQRLLPVLCQAHGLTPEQVVAIASNGGGKQALETVQRLLPVLCQAHGLTPEQVVAIASNNGGKQALETVQRLLPVLCQAHGLTPEQVVAIASNIGGKQALETVQRLLPVLCQAHGLTPEQVVAIASNGGGKQALETVQRLLPVLCQAHGLTPEQVVAIASNIGGKQALETVQRLLPVLCQAHGLTPEQVVAIASNIGGKQALETVQRLLPVLCQAHGLTPEQVVAIASNGGGKQALETVQRLLPVLCQAHGLTPEQVVAIASNIGGKQALETVQRLLPVLCQAHGLTPEQVVAIASHDGGRPALESIVAQLSRPDPALAALTNDHLVALACLGGRPALDAVKKGLPHAPALIKRTNRRIPERTSHRVAASLDLASLILNGAIGGDLLLNFPDMSVLERQRAHLKYLNPTFDSPLAGFFADSSMITGGEMDSYLSTAGLNLPMMYGETTVEGDSRLSISPETTLGTGNFKAAKFDTETKDCNEAAKKMTMNRDDLVEEGEEEKSKITEQNNGSTKSIKKMKHKAKKEENNFSNDSSKVTKELEKTDYIHVRARRGQATDSHSIAERVRREKISERMKFLQDLVPGCDKITGKAGMLDEIINYVQSLQRQIEFLSMKLAIVNPRPDFDMDDIFAKEVASTPMTVVPSPEMVLSGYSHEMVHSGYSSEMVNSGYLHVNPMQQVNTSSDPLSCFNNGEAPSMWDSHVQNLYGNLGV

SEQ ID NO: 150 - protein, 1187 aa, Artificial Sequence
  Description of Artificial Sequence: Synthetic polypeptide
YPYDVPDYASRTRLPSPPAPSPAFSADSFSDLLRQFDPSLFNTSLFDSLPPFGAHHTEAATGEWDEVQSGLRAADAPPPTMRVAVTAARPPRAKPAPRRRAAQPSDASPAAQVDLRTLGYSQQQQEKIKPKVRSTVAQHHEALVGHGFTHAHIVALSQHPAALGTVAVKYQDMIAALPEATHEAIVGVGKQWSGARALEALLTVAGELRGPPLQLDTGQLLKIAKRGGVTAVEAVHAWRNALTGAPLNLTPEQVVAIASNGGGKQALETVQRLLPVLCQAHGLTPEQVVAIASNNGGKQALETVQRLLPVLCQAHGLTPEQVVAIASNIGGKQALETVQRLLPVLCQAHGLTPEQVVAIASNIGGKQALETVQRLLPVLCQAHGLTPEQVVAIASNGGGKQALETVQRLLPVLCQAHGLTPEQVVAIASNNGGKQALETVQRLLPVLCQAHGLTPEQVVAIASNIGGKQALETVQRLLPVLCQAHGLTPEQVVAIASNGGGKQALETVQRLLPVLCQAHGLTPEQVVAIASNNGGKQALETVQRLLPVLCQAHGLTPEQVVAIASNIGGKQALETVQRLLPVLCQAHGLTPEQVVAIASNGGGKQALETVQRLLPVLCQAHGLTPEQVVAIASNIGGKQALETVQRLLPVLCQAHGLTPEQVVAIASNIGGKQALETVQRLLPVLCQAHGLTPEQVVAIASNGGGKQALETVQRLLPVLCQAHGLTPEQVVAIASNIGGKQALETVQRLLPVLCQAHGLTPEQVVAIASHDGGRPALESIVAQLSRPDPALAALTNDHLVALACLGGRPALDAVKKGLPHAPALIKRTNRRIPERTSHRVAASLQKKLEELELNGAIGGDLLLNFPDMSVLERQRAHLKYLNPTFDSPLAGFFADSSMITGGEMDSYLSTAGLNLPMMYGETTVEGDSRLSISPETTLGTGNFKAAKFDTETKDCNEAAKKMTMNRDDLVEEGEEEKSKITEQNNGSTKSIKKMKHKAKKEENNFSNDSSKVTKELEKTDYIHVRARRGQATDSHSIAERVRREKISERMKFLQDLVPGCDKITGKAGMLDEIINYVQSLQRQIEFLSMKLAIVNPRPDFDMDDIFAKEVASTPMTVVPSPEMVLSGYSHEMVHSGYSSEMVNSGYLHVNPMQQVNTSSDPLSCFNNGEAPSMWDSHVQNLYGNLGV

SEQ ID NO: 151 - protein, 1159 aa, Artificial Sequence
  Description of Artificial Sequence: Synthetic polypeptide
YPYDVPDYASRTRLPSPPAPSPAFSADSFSDLLRQFDPSLFNTSLFDSLPPFGAHHTEAATGEWDEVQSGLRAADAPPPTMRVAVTAARPPRAKPAPRRRAAQPSDASPAAQVDLRTLGYSQQQQEKIKPKVRSTVAQHHEALVGHGFTHAHIVALSQHPAALGTVAVKYQDMIAALPEATHEAIVGVGKQWSGARALEALLTVAGELRGPPLQLDTGQLLKIAKRGGVTAVEAVHAWRNALTGAPLNLTPEQVVAIASNGGGKQALETVQRLLPVLCQAHGLTPEQVVAIASNNGGKQALETVQRLLPVLCQAHGLTPEQVVAIASNIGGKQALETVQRLLPVLCQAHGLTPEQVVAIASNIGGKQALETVQRLLPVLCQAHGLTPEQVVAIASNGGGKQALETVQRLLPVLCQAHGLTPEQVVAIASNNGGKQALETVQRLLPVLCQAHGLTPEQVVAIASNIGGKQALETVQRLLPVLCQAHGLTPEQVVAIASNGGGKQALETVQRLLPVLCQAHGLTPEQVVAIASNNGGKQALETVQRLLPVLCQAHGLTPEQVVAIASNIGGKQALETVQRLLPVLCQAHGLTPEQVVAIASNGGGKQALETVQRLLPVLCQAHGLTPEQVVAIASNIGGKQALETVQRLLPVLCQAHGLTPEQVVAIASNIGGKQALETVQRLLPVLCQAHGLTPEQVVAIASNGGGKQALETVQRLLPVLCQAHGLTPEQVVAIASNIGGKQALETVQRLLPVLCQAHGLTPEQVVAIASHDGGRPALESIVAQLSRPDPALAALTNDHLVALACLGGRPALDAVKKGLPHAPALIKRTNRRIPERTSHRVAASGGGGSGGGGSNGAIGGDLLLNFPDMSVLERQRAHLKYLNPTFDSPLAGFFADSSMITGGEMDSYLSTAGLNLPMMYGETTVEGDSRLSISPETTLGTGNFKAAKFDTETKDCNEAAKKMTMNRDDLVEEGEEEKSKITEQNNGSTKSIKKMKHKAKKEENNFSNDSSKVTKELEKTDYIHVRARRGQATDSHSIAERVRREKISERMKFLQDLVPGCDKITGKAGMLDEIINYVQSLQRQIEFLSMKLAIVNPRPDFDMDDIFAKEVASTPMTVVPSPEMVLSGYSHEMVHSGYSSEMVNSGYLHVNPMQQVNTSS

SEQ ID NO: 152 - protein, 1160 aa, Artificial Sequence
  Description of Artificial Sequence: Synthetic polypeptide
YPYDVPDYASRTRLPSPPAPSPAFSADSFSDLLRQFDPSLFNTSLFDSLPPFGAHHTEAATGEWDEVQSGLRAADAPPPTMRVAVTAARPPRAKPAPRRRAAQPSDASPAAQVDLRTLGYSQQQQEKIKPKVRSTVAQHHEALVGHGFTHAHIVALSQHPAALGTVAVKYQDMIAALPEATHEAIVGVGKQWSGARALEALLTVAGELRGPPLQLDTGQLLKIAKRGGVTAVEAVHAWRNALTGAPLNLTPEQVVAIASNGGGKQALETVQRLLPVLCQAHGLTPEQVVAIASNNGGKQALETVQRLLPVLCQAHGLTPEQVVAIASNIGGKQALETVQRLLPVLCQAHGLTPEQVVAIASNIGGKQALETVQRLLPVLCQAHGLTPEQVVAIASNGGGKQALETVQRLLPVLCQAHGLTPEQVVAIASNNGGKQALETVQRLLPVLCQAHGLTPEQVVAIASNIGGKQALETVQRLLPVLCQAHGLTPEQVVAIASNGGGKQALETVQRLLPVLCQAHGLTPEQVVAIASNNGGKQALETVQRLLPVLCQAHGLTPEQVVAIASNIGGKQALETVQRLLPVLCQAHGLTPEQVVAIASNGGGKQALETVQRLLPVLCQAHGLTPEQVVAIASNIGGKQALETVQRLLPVLCQAHGLTPEQVVAIASNIGGKQALETVQRLLPVLCQAHGLTPEQVVAIASNGGGKQALETVQRLLPVLCQAHGLTPEQVVAIASNIGGKQALETVQRLLPVLCQAHGLTPEQVVAIASHDGGRPALESIVAQLSRPDPALAALTNDHLVALACLGGRPALDAVKKGLPHAPALIKRTNRRIPERTSHRVAASLYPERLRRILTNGAIGGDLLLNFPDMSVLERQRAHLKYLNPTFDSPLAGFFADSSMITGGEMDSYLSTAGLNLPMMYGETTVEGDSRLSISPETTLGTGNFKAAKFDTETKDCNEAAKKMTMNRDDLVEEGEEEKSKITEQNNGSTKSIKKMKHKAKKEENNFSNDSSKVTKELEKTDYIHVRARRGQATDSHSIAERVRREKISERMKFLQDLVPGCDKITGKAGMLDEIINYVQSLQRQIEFLSMKLAIVNPRPDFDMDDIFAKEVASTPMTVVPSPEMVLSGYSHEMVHSGYSSEMVNSGYLHVNPMQQVNTSS

SEQ ID NO: 153 - protein, 1160 aa, Artificial Sequence
  Description of Artificial Sequence: Synthetic polypeptide
YPYDVPDYASRTRLPSPPAPSPAFSADSFSDLLRQFDPSLFNTSLFDSLPPFGAHHTEAATGEWDEVQSGLRAADAPPPTMRVAVTAARPPRAKPAPRRRAAQPSDASPAAQVDLRTLGYSQQQQEKIKPKVRSTVAQHHEALVGHGFTHAHIVALSQHPAALGTVAVKYQDMIAALPEATHEAIVGVGKQWSGARALEALLTVAGELRGPPLQLDTGQLLKIAKRGGVTAVEAVHAWRNALTGAPLNLTPEQVVAIASNGGGKQALETVQRLLPVLCQAHGLTPEQVVAIASNNGGKQALETVQRLLPVLCQAHGLTPEQVVAIASNIGGKQALETVQRLLPVLCQAHGLTPEQVVAIASNIGGKQALETVQRLLPVLCQAHGLTPEQVVAIASNGGGKQALETVQRLLPVLCQAHGLTPEQVVAIASNNGGKQALETVQRLLPVLCQAHGLTPEQVVAIASNIGGKQALETVQRLLPVLCQAHGLTPEQVVAIASNGGGKQALETVQRLLPVLCQAHGLTPEQVVAIASNNGGKQALETVQRLLPVLCQAHGLTPEQVVAIASNIGGKQALETVQRLLPVLCQAHGLTPEQVVAIASNGGGKQALETVQRLLPVLCQAHGLTPEQVVAIASNIGGKQALETVQRLLPVLCQAHGLTPEQVVAIASNIGGKQALETVQRLLPVLCQAHGLTPEQVVAIASNGGGKQALETVQRLLPVLCQAHGLTPEQVVAIASNIGGKQALETVQRLLPVLCQAHGLTPEQVVAIASHDGGRPALESIVAQLSRPDPALAALTNDHLVALACLGGRPALDAVKKGLPHAPALIKRTNRRIPERTSHRVAASSPKKKRKVEASNGAIGGDLLLNFPDMSVLERQRAHLKYLNPTFDSPLAGFFADSSMITGGEMDSYLSTAGLNLPMMYGETTVEGDSRLSISPETTLGTGNFKAAKFDTETKDCNEAAKKMTMNRDDLVEEGEEEKSKITEQNNGSTKSIKKMKHKAKKEENNFSNDSSKVTKELEKTDYIHVRARRGQATDSHSIAERVRREKISERMKFLQDLVPGCDKITGKAGMLDEIINYVQSLQRQIEFLSMKLAIVNPRPDFDMDDIFAKEVASTPMTVVPSPEMVLSGYSHEMVHSGYSSEMVNSGYLHVNPMQQVNTSS

SEQ ID NO: 154 - protein, 1187 aa, Artificial Sequence
  Description of Artificial Sequence: Synthetic polypeptide
YPYDVPDYASRTRLPSPPAPSPAFSADSFSDLLRQFDPSLFNTSLFDSLPPFGAHHTEAATGEWDEVQSGLRAADAPPPTMRVAVTAARPPRAKPAPRRRAAQPSDASPAAQVDLRTLGYSQQQQEKIKPKVRSTVAQHHEALVGHGFTHAHIVALSQHPAALGTVAVKYQDMIAALPEATHEAIVGVGKQWSGARALEALLTVAGELRGPPLQLDTGQLLKIAKRGGVTAVEAVHAWRNALTGAPLNLTPEQVVAIASNGGGKQALETVQRLLPVLCQAHGLTPEQVVAIASNNGGKQALETVQRLLPVLCQAHGLTPEQVVAIASNIGGKQALETVQRLLPVLCQAHGLTPEQVVAIASNIGGKQALETVQRLLPVLCQAHGLTPEQVVAIASNGGGKQALETVQRLLPVLCQAHGLTPEQVVAIASNNGGKQALETVQRLLPVLCQAHGLTPEQVVAIASNIGGKQALETVQRLLPVLCQAHGLTPEQVVAIASNGGGKQALETVQRLLPVLCQAHGLTPEQVVAIASNNGGKQALETVQRLLPVLCQAHGLTPEQVVAIASNIGGKQALETVQRLLPVLCQAHGLTPEQVVAIASNGGGKQALETVQRLLPVLCQAHGLTPEQVVAIASNIGGKQALETVQRLLPVLCQAHGLTPEQVVAIASNIGGKQALETVQRLLPVLCQAHGLTPEQVVAIASNGGGKQALETVQRLLPVLCQAHGLTPEQVVAIASNIGGKQALETVQRLLPVLCQAHGLTPEQVVAIASHDGGRPALESIVAQLSRPDPALAALTNDHLVALACLGGRPALDAVKKGLPHAPALIKRTNRRIPERTSHRVAASGGGGSGGGGSNGAIGGDLLLNFPDMSVLERQRAHLKYLNPTFDSPLAGFFADSSMITGGEMDSYLSTAGLNLPMMYGETTVEGDSRLSISPETTLGTGNFKAAKFDTETKDCNEAAKKMTMNRDDLVEEGEEEKSKITEQNNGSTKSIKKMKHKAKKEENNFSNDSSKVTKELEKTDYIHVRARAAQATDSHSIAEAVAREKISERMKFLQDLVPGCDKITGKAGMLDEIINYVQSLQRQIEFLSMKLAIVNPRPDFDMDDIFAKEVASTPMTVVPSPEMVLSGYSHEMVHSGYSSEMVNSGYLHVNPMQQVNTSSDPLSCFNNGEAPSMWDSHVQNLYGNLGV

SEQ ID NO: 155 - protein, 1179 aa, Artificial Sequence
  Description of Artificial Sequence: Synthetic polypeptide
SRTRLPSPPAPSPAFSADSFSDLLRQFDPSLFNTSLFDSLPPFGAHHTEAATGEWDEVQSGLRAADAPPPTMRVAVTAARPPRAKPAPRRRAAQPSDASPAAQVDLRTLGYSQQQQEKIKPKVRSTVAQHHEALVGHGFTHAHIVALSQHPAALGTVAVKYQDMIAALPEATHEAIVGVGKQWSGARALEALLTVAGELRGPPLQLDTGQLLKIAKRGGVTAVEAVHAWRNALTGAPLNLTPEQVVAIASNGGGKQALETVQRLLPVLCQAHGLTPEQVVAIASNNGGKQALETVQRLLPVLCQAHGLTPEQVVAIASNIGGKQALETVQRLLPVLCQAHGLTPEQVVAIASNIGGKQALETVQRLLPVLCQAHGLTPEQVVAIASNGGGKQALETVQRLLPVLCQAHGLTPEQVVAIASNNGGKQALETVQRLLPVLCQAHGLTPEQVVAIASNIGGKQALETVQRLLPVLCQAHGLTPEQVVAIASNGGGKQALETVQRLLPVLCQAHGLTPEQVVAIASNNGGKQALETVQRLLPVLCQAHGLTPEQVVAIASNIGGKQALETVQRLLPVLCQAHGLTPEQVVAIASNGGGKQALETVQRLLPVLCQAHGLTPEQVVAIASNIGGKQALETVQRLLPVLCQAHGLTPEQVVAIASNIGGKQALETVQRLLPVLCQAHGLTPEQVVAIASNGGGKQALETVQRLLPVLCQAHGLTPEQVVAIASNIGGKQALETVQRLLPVLCQAHGLTPEQVVAIASHDGGRPALESIVAQLSRPDPALAALTNDHLVALACLGGRPALDAVKKGLPHAPALIKRTNRRIPERTSHRVAASLYPERLRRILTNGAIGGDLLLNFPDMSVLERQRAHLKYLNPTFDSPLAGFFADSSMITGGEMDSYLSTAGLNLPMMYGETTVEGDSRLSISPETTLGTGNFKAAKFDTETKDCNEAAKKMTMNRDDLVEEGEEEKSKITEQNNGSTKSIKKMKHKAKKEENNFSNDSSKVTKELEKTDYIHVRARAAQATDSHSIAEAVAREKISERMKFLQDLVPGCDKITGKAGMLDEIINYVQSLQRQIEFLSMKLAIVNPRPDFDMDDIFAKEVASTPMTVVPSPEMVLSGYSHEMVHSGYSSEMVNSGYLHVNPMQQVNTSSDPLSCFNNGEAPSMWDSHVQNLYGNLGV

SEQ ID NO: 156 - protein, 1163 aa, Artificial Sequence
  Description of Artificial Sequence: Synthetic polypeptide
YPYDVPDYASRTRLPSPPAPSPAFSADSFSDLLRQFDPSLFNTSLFDSLPPFGAHHTEAATGEWDEVQSGLRAADAPPPTMRVAVTAARPPRAKPAPRRRAAQPSDASPAAQVDLRTLGYSQQQQEKIKPKVRSTVAQHHEALVGHGFTHAHIVALSQHPAALGTVAVKYQDMIAALPEATHEAIVGVGKQWSGARALEALLTVAGELRGPPLQLDTGQLLKIAKRGGVTAVEAVHAWRNALTGAPLNLTPEQVVAIASNGGGKQALETVQRLLPVLCQAHGLTPEQVVAIASNNGGKQALETVQRLLPVLCQAHGLTPEQVVAIASNIGGKQALETVQRLLPVLCQAHGLTPEQVVAIASNIGGKQALETVQRLLPVLCQAHGLTPEQVVAIASNGGGKQALETVQRLLPVLCQAHGLTPEQVVAIASNNGGKQALETVQRLLPVLCQAHGLTPEQVVAIASNIGGKQALETVQRLLPVLCQAHGLTPEQVVAIASNGGGKQALETVQRLLPVLCQAHGLTPEQVVAIASNNGGKQALETVQRLLPVLCQAHGLTPEQVVAIASNIGGKQALETVQRLLPVLCQAHGLTPEQVVAIASNGGGKQALETVQRLLPVLCQAHGLTPEQVVAIASNIGGKQALETVQRLLPVLCQAHGLTPEQVVAIASNIGGKQALETVQRLLPVLCQAHGLTPEQVVAIASNGGGKQALETVQRLLPVLCQAHGLTPEQVVAIASNIGGKQALETVQRLLPVLCQAHGLTPEQVVAIASHDGGRPALESIVAQLSRPDPALAALTNDHLVALACLGGRPALDAVKKGLPHAPALIKRTNRRIPERTSHRVAASGGGGSGGGGSNGAIGGDLLLNFPDMSVLERQRAHLKYLNPTFDSPLAGFFADSSMITGGEMDSYLSTAGLNLPMMYGETTVEGDSRLSISPETTLGTGNFKAAKFDTETKDCNEAAKKMTMNRDDLVEEGEEEKSKITEQNNGSTKSIKKMKHKAKKEENNFSNDSSKVTKELEKTDYIHVRARRGQATDSHSIAERVRREKISERMKFLQDLVPGCDKITGKAGMLDEIINYVQSLQRGGSVASTPMTVVPSPEMVLSGYSHEMVHSGYSSEMVNSGYLHVNPMQQVNTSSDPLSCFNNGEAPSMWDSHVQNLYGNLGV

SEQ ID NO: 157 - protein, 1277 aa, Artificial Sequence
  Description of Artificial Sequence: Synthetic polypeptide
YPYDVPDYASRTRLPSPPAPSPAFSADSFSDLLRQFDPSLFNTSLFDSLPPFGAHHTEAATGEWDEVQSGLRAADAPPPTMRVAVTAARPPRAKPAPRRRAAQPSDASPAAQVDLRTLGYSQQQQEKIKPKVRSTVAQHHEALVGHGFTHAHIVALSQHPAALGTVAVKYQDMIAALPEATHEAIVGVGKQWSGARALEALLTVAGELRGPPLQLDTGQLLKIAKRGGVTAVEAVHAWRNALTGAPLNLTPEQVVAIASNGGGKQALETVQRLLPVLCQAHGLTPEQVVAIASNNGGKQALETVQRLLPVLCQAHGLTPEQVVAIASNIGGKQALETVQRLLPVLCQAHGLTPEQVVAIASNIGGKQALETVQRLLPVLCQAHGLTPEQVVAIASNGGGKQALETVQRLLPVLCQAHGLTPEQVVAIASNNGGKQALETVQRLLPVLCQAHGLTPEQVVAIASNIGGKQALETVQRLLPVLCQAHGLTPEQVVAIASNGGGKQALETVQRLLPVLCQAHGLTPEQVVAIASNNGGKQALETVQRLLPVLCQAHGLTPEQVVAIASNIGGKQALETVQRLLPVLCQAHGLTPEQVVAIASNGGGKQALETVQRLLPVLCQAHGLTPEQVVAIASNIGGKQALETVQRLLPVLCQAHGLTPEQVVAIASNIGGKQALETVQRLLPVLCQAHGLTPEQVVAIASNGGGKQALETVQRLLPVLCQAHGLTPEQVVAIASNIGGKQALETVQRLLPVLCQAHGLTPEQVVAIASHDGGRPALESIVAQLSRPDPALAALTNDHLVALACLGGRPALDAVKKGLPHAPALIKRTNRRIPERTSHRVAASLYPERLRRILTNGAIGGDLLLNFPDMSVLERQRAHLKYLNPTFDSPLAGFFADSSMITGGEMDSYLSTAGLNLPMMYGETTVEGDSRLSISPETTLGTGNFKAAKFDTETKDCNEAAKKMTMNRDDLVEEGEEEKSKITEQNNGSTKSIKKMKHKAKKEENNFSNDSSKVTKELEKTDYIHVRARRGQATDSHSIAERVRREKISERMKFLQDLVPGCDKITGKAGMLDEIINYVQSLQRGGSGEEEKSKITEQNNGSTKSIKKMKHKAKKEENNFSNDSSKVTKELEKTDYIHVRARRGQATDSHSIAERVRREKISERMKFLQDLVPGCDKITGKAGMLDEIINYVQSLQRGGSVASTPMTVVPSPEMVLSGYSHEMVHSGYSSEMVNSGYLHVNPMQQVNTSSDPLSCFNNGEAPSMWDSHVQNLYGNLGV

SEQ ID NO: 158 - protein, 1158 aa, Artificial Sequence
  Description of Artificial Sequence: Synthetic polypeptide
YPYDVPDYASRTRLPSPPAPSPAFSADSFSDLLRQFDPSLFNTSLFDSLPPFGAHHTEAATGEWDEVQSGLRAADAPPPTMRVAVTAARPPRAKPAPRRRAAQPSDASPAAQVDLRTLGYSQQQQEKIKPKVRSTVAQHHEALVGHGFTHAHIVALSQHPAALGTVAVKYQDMIAALPEATHEAIVGVGKQWSGARALEALLTVAGELRGPPLQLDTGQLLKIAKRGGVTAVEAVHAWRNALTGAPLNLTPEQVVAIASNGGGKQALETVQRLLPVLCQAHGLTPEQVVAIASNNGGKQALETVQRLLPVLCQAHGLTPEQVVAIASNIGGKQALETVQRLLPVLCQAHGLTPEQVVAIASNIGGKQALETVQRLLPVLCQAHGLTPEQVVAIASNGGGKQALETVQRLLPVLCQAHGLTPEQVVAIASNNGGKQALETVQRLLPVLCQAHGLTPEQVVAIASNIGGKQALETVQRLLPVLCQAHGLTPEQVVAIASNGGGKQALETVQRLLPVLCQAHGLTPEQVVAIASNNGGKQALETVQRLLPVLCQAHGLTPEQVVAIASNIGGKQALETVQRLLPVLCQAHGLTPEQVVAIASNGGGKQALETVQRLLPVLCQAHGLTPEQVVAIASNIGGKQALETVQRLLPVLCQAHGLTPEQVVAIASNIGGKQALETVQRLLPVLCQAHGLTPEQVVAIASNGGGKQALETVQRLLPVLCQAHGLTPEQVVAIASNIGGKQALETVQRLLPVLCQAHGLTPEQVVAIASHDGGRPALESIVAQLSRPDPALAALTNDHLVALACLGGRPALDAVKKGLPHAPALIKRTNRRIPERTSHRVAASGGGGSGGGGSNGAIGGDLLLNFPDMSVLERQRAHLKYLNPTFDSPLAGFFADSSMITGGEMDSYLSTAGLNLPMMYGETTVEGDSRLSISPETTLGTGNFKAAKFDTETKDCNEAAKKMTMNRDDLVEEGEEEKSKITEQNNGSTKSIKKMKHKAKKEENNFSNDSSKVTKELEKTDYIHVRARRGQATDSHSIAERVRREKISERMKFLQDLVPGCDKITGKAGMLDEIINYVQSLQRQIEFLSMKLAIVNPRPDFDMDDIFAKEVASTPMTVVPSPEMVLSGYGGSPLSCFNNGEAPSMWDSHVQNLYGNLGV

SEQ ID NO: 159 - protein, 1159 aa, Artificial Sequence
  Description of Artificial Sequence: Synthetic polypeptide
YPYDVPDYASRTRLPSPPAPSPAFSADSFSDLLRQFDPSLFNTSLFDSLPPFGAHHTEAATGEWDEVQSGLRAADAPPPTMRVAVTAARPPRAKPAPRRRAAQPSDASPAAQVDLRTLGYSQQQQEKIKPKVRSTVAQHHEALVGHGFTHAHIVALSQHPAALGTVAVKYQDMIAALPEATHEAIVGVGKQWSGARALEALLTVAGELRGPPLQLDTGQLLKIAKRGGVTAVEAVHAWRNALTGAPLNLTPEQVVAIASNGGGKQALETVQRLLPVLCQAHGLTPEQVVAIASNNGGKQALETVQRLLPVLCQAHGLTPEQVVAIASNIGGKQALETVQRLLPVLCQAHGLTPEQVVAIASNIGGKQALETVQRLLPVLCQAHGLTPEQVVAIASNGGGKQALETVQRLLPVLCQAHGLTPEQVVAIASNNGGKQALETVQRLLPVLCQAHGLTPEQVVAIASNIGGKQALETVQRLLPVLCQAHGLTPEQVVAIASNGGGKQALETVQRLLPVLCQAHGLTPEQVVAIASNNGGKQALETVQRLLPVLCQAHGLTPEQVVAIASNIGGKQALETVQRLLPVLCQAHGLTPEQVVAIASNGGGKQALETVQRLLPVLCQAHGLTPEQVVAIASNIGGKQALETVQRLLPVLCQAHGLTPEQVVAIASNIGGKQALETVQRLLPVLCQAHGLTPEQVVAIASNGGGKQALETVQRLLPVLCQAHGLTPEQVVAIASNIGGKQALETVQRLLPVLCQAHGLTPEQVVAIASHDGGRPALESIVAQLSRPDPALAALTNDHLVALACLGGRPALDAVKKGLPHAPALIKRTNRRIPERTSHRVAASLYPERLRRILTNGAIGGDLLLNFPDMSVLERQRAHLKYLNPTFDSPLAGFFADSSMITGGEMDSYLSTAGLNLPMMYGETTVEGDSRLSISPETTLGTGNFKAAKFDTETKDCNEAAKKMTMNRDDLVEEGEEEKSKITEQNNGSTKSIKKMKHKAKKEENNFSNDSSKVTKELEKTDYIHVRARRGQATDSHSIAERVRREKISERMKFLQDLVPGCDKITGKAGMLDEIINYVQSLQRQIEFLSMKLAIVNPRPDFDMDDIFAKEVASTPMTVVPSPEMVLSGYGGSPLSCFNNGEAPSMWDSHVQNLYGNLGV

SEQ ID NO: 160 - protein, 1188 aa, Artificial Sequence
  Description of Artificial Sequence: Synthetic polypeptide
YPYDVPDYASRTRLPSPPAPSPAFSADSFSDLLRQFDPSLFNTSLFDSLPPFGAHHTEAATGEWDEVQSGLRAADAPPPTMRVAVTAARPPRAKPAPRRRAAQPSDASPAAQVDLRTLGYSQQQQEKIKPKVRSTVAQHHEALVGHGFTHAHIVALSQHPAALGTVAVKYQDMIAALPEATHEAIVGVGKQWSGARALEALLTVAGELRGPPLQLDTGQLLKIAKRGGVTAVEAVHAWRNALTGAPLNLTPEQVVAIASNGGGKQALETVQRLLPVLCQAHGLTPEQVVAIASNNGGKQALETVQRLLPVLCQAHGLTPEQVVAIASNIGGKQALETVQRLLPVLCQAHGLTPEQVVAIASNIGGKQALETVQRLLPVLCQAHGLTPEQVVAIASNGGGKQALETVQRLLPVLCQAHGLTPEQVVAIASNNGGKQALETVQRLLPVLCQAHGLTPEQVVAIASNIGGKQALETVQRLLPVLCQAHGLTPEQVVAIASNGGGKQALETVQRLLPVLCQAHGLTPEQVVAIASNNGGKQALETVQRLLPVLCQAHGLTPEQVVAIASNIGGKQALETVQRLLPVLCQAHGLTPEQVVAIASNGGGKQALETVQRLLPVLCQAHGLTPEQVVAIASNIGGKQALETVQRLLPVLCQAHGLTPEQVVAIASNIGGKQALETVQRLLPVLCQAHGLTPEQVVAIASNGGGKQALETVQRLLPVLCQAHGLTPEQVVAIASNIGGKQALETVQRLLPVLCQAHGLTPEQVVAIASHDGGRPALESIVAQLSRPDPALAALTNDHLVALACLGGRPALDAVKKGLPHAPALIKRTNRRIPERTSHRVAASSPKKKRKVEASNGAIGGDLLLNFPDMSVLERQRAHLKYLNPTFDSPLAGFFADSSMITGGEMDSYLSTAGLNLPMMYGETTVEGDSRLSISPETTLGTGNFKAAKFDTETKDCNEAAKKMTMNRDDLVEEGEEEKSKITEQNNGSTKSIKKMKHKAKKEENNFSNDSSKVTKELEKTDYIHVRARAAQATDSHSIAEAVAREKISERMKFLQDLVPGCDKITGKAGMLDEIINYVQSLQRQIEFLSMKLAIVNPRPDFDMDDIFAKEVASTPMTVVPSPEMVLSGYSHEMVHSGYSSEMVNSGYLHVNPMQQVNTSSDPLSCFNNGEAPSMWDSHVQNLYGNLGV

SEQ ID NO: 161 - protein, 1164 aa, Artificial Sequence
  Description of Artificial Sequence: Synthetic polypeptide
YPYDVPDYASRTRLPSPPAPSPAFSADSFSDLLRQFDPSLFNTSLFDSLPPFGAHHTEAATGEWDEVQSGLRAADAPPPTMRVAVTAARPPRAKPAPRRRAAQPSDASPAAQVDLRTLGYSQQQQEKIKPKVRSTVAQHHEALVGHGFTHAHIVALSQHPAALGTVAVKYQDMIAALPEATHEAIVGVGKQWSGARALEALLTVAGELRGPPLQLDTGQLLKIAKRGGVTAVEAVHAWRNALTGAPLNLTPEQVVAIASNGGGKQALETVQRLLPVLCQAHGLTPEQVVAIASNNGGKQALETVQRLLPVLCQAHGLTPEQVVAIASNIGGKQALETVQRLLPVLCQAHGLTPEQVVAIASNIGGKQALETVQRLLPVLCQAHGLTPEQVVAIASNGGGKQALETVQRLLPVLCQAHGLTPEQVVAIASNNGGKQALETVQRLLPVLCQAHGLTPEQVVAIASNIGGKQALETVQRLLPVLCQAHGLTPEQVVAIASNGGGKQALETVQRLLPVLCQAHGLTPEQVVAIASNNGGKQALETVQRLLPVLCQAHGLTPEQVVAIASNIGGKQALETVQRLLPVLCQAHGLTPEQVVAIASNGGGKQALETVQRLLPVLCQAHGLTPEQVVAIASNIGGKQALETVQRLLPVLCQAHGLTPEQVVAIASNIGGKQALETVQRLLPVLCQAHGLTPEQVVAIASNGGGKQALETVQRLLPVLCQAHGLTPEQVVAIASNIGGKQALETVQRLLPVLCQAHGLTPEQVVAIASHDGGRPALESIVAQLSRPDPALAALTNDHLVALACLGGRPALDAVKKGLPHAPALIKRTNRRIPERTSHRVAASSPKKKRKVEASNGAIGGDLLLNFPDMSVLERQRAHLKYLNPTFDSPLAGFFADSSMITGGEMDSYLSTAGLNLPMMYGETTVEGDSRLSISPETTLGTGNFKAAKFDTETKDCNEAAKKMTMNRDDLVEEGEEEKSKITEQNNGSTKSIKKMKHKAKKEENNFSNDSSKVTKELEKTDYIHVRARRGQATDSHSIAERVRREKISERMKFLQDLVPGCDKITGKAGMLDEIINYVQSLQRGGSVASTPMTVVPSPEMVLSGYSHEMVHSGYSSEMVNSGYLHVNPMQQVNTSSDPLSCFNNGEAPSMWDSHVQNLYGNLGV

SEQ ID NO: 162 - protein, 1159 aa, Artificial Sequence; identical to SEQ ID NO: 159
  Description of Artificial Sequence: Synthetic polypeptide

SEQ ID NO: 163 - protein, 1198 aa, Artificial Sequence
  Description of Artificial Sequence: Synthetic polypeptide
YPYDVPDYASRTRLPSPPAPSPAFSADSFSDLLRQFDPSLFNTSLFDSLPPFGAHHTEAATGEWDEVQSGLRAADAPPPTMRVAVTAARPPRAKPAPRRRAAQPSDASPAAQVDLRTLGYSQQQQEKIKPKVRSTVAQHHEALVGHGFTHAHIVALSQHPAALGTVAVKYQDMIAALPEATHEAIVGVGKQWSGARALEALLTVAGELRGPPLQLDTGQLLKIAKRGGVTAVEAVHAWRNALTGAPLNLTPEQVVAIASNGGGKQALETVQRLLPVLCQAHGLTPEQVVAIASNNGGKQALETVQRLLPVLCQAHGLTPEQVVAIASNIGGKQALETVQRLLPVLCQAHGLTPEQVVAIASNIGGKQALETVQRLLPVLCQAHGLTPEQVVAIASNGGGKQALETVQRLLPVLCQAHGLTPEQVVAIASNNGGKQALETVQRLLPVLCQAHGLTPEQVVAIASNIGGKQALETVQRLLPVLCQAHGLTPEQVVAIASNGGGKQALETVQRLLPVLCQAHGLTPEQVVAIASNNGGKQALETVQRLLPVLCQAHGLTPEQVVAIASNIGGKQALETVQRLLPVLCQAHGLTPEQVVAIASNGGGKQALETVQRLLPVLCQAHGLTPEQVVAIASNIGGKQALETVQRLLPVLCQAHGLTPEQVVAIASNIGGKQALETVQRLLPVLCQAHGLTPEQVVAIASNGGGKQALETVQRLLPVLCQAHGLTPEQVVAIASNIGGKQALETVQRLLPVLCQAHGLTPEQVVAIASHDGGRPALESIVAQLSRPDPALAALTNDHLVALACLGGRPALDAVKKGLPHAPALIKRTNRRIPERTSHRVAASGGGGSGGGGSNGAIGGDLLLNFPDMSVLERQRAHLKYLLYPERLRRILTNPTFDSPLAGFFADSSMITGGEMDSYLSTAGLNLPMMYGETTVEGDSRLSISPETTLGTGNFKAAKFDTETKDCNEAAKKMTMNRDDLVEEGEEEKSKITEQNNGSTKSIKKMKHKAKKEENNFSNDSSKVTKELEKTDYIHVRARRGQATDSHSIAERVRREKISERMKFLQDLVPGCDKITGKAGMLDEIINYVQSLQRQIEFLSMKLAIVNPRPDFDMDDIFAKEVASTPMTVVPSPEMVLSGYSHEMVHSGYSSEMVNSGYLHVNPMQQVNTSSDPLSCFNNGEAPSMWDSHVQNLYGNLGV

SEQ ID NO: 164 - protein, 1198 aa, Artificial Sequence
  Description of Artificial Sequence: Synthetic polypeptide
YPYDVPDYASRTRLPSPPAPSPAFSADSFSDLLRQFDPSLFNTSLFDSLPPFGAHHTEAATGEWDEVQSGLRAADAPPPTMRVAVTAARPPRAKPAPRRRAAQPSDASPAAQVDLRTLGYSQQQQEKIKPKVRSTVAQHHEALVGHGFTHAHIVALSQHPAALGTVAVKYQDMIAALPEATHEAIVGVGKQWSGARALEALLTVAGELRGPPLQLDTGQLLKIAKRGGVTAVEAVHAWRNALTGAPLNLTPEQVVAIASNGGGKQALETVQRLLPVLCQAHGLTPEQVVAIASNNGGKQALETVQRLLPVLCQAHGLTPEQVVAIASNIGGKQALETVQRLLPVLCQAHGLTPEQVVAIASNIGGKQALETVQRLLPVLCQAHGLTPEQVVAIASNGGGKQALETVQRLLPVLCQAHGLTPEQVVAIASNNGGKQALETVQRLLPVLCQAHGLTPEQVVAIASNIGGKQALETVQRLLPVLCQAHGLTPEQVVAIASNGGGKQALETVQRLLPVLCQAHGLTPEQVVAIASNNGGKQALETVQRLLPVLCQAHGLTPEQVVAIASNIGGKQALETVQRLLPVLCQAHGLTPEQVVAIASNGGGKQALETVQRLLPVLCQAHGLTPEQVVAIASNIGGKQALETVQRLLPVLCQAHGLTPEQVVAIASNIGGKQALETVQRLLPVLCQAHGLTPEQVVAIASNGGGKQALETVQRLLPVLCQAHGLTPEQVVAIASNIGGKQALETVQRLLPVLCQAHGLTPEQVVAIASHDGGRPALESIVAQLSRPDPALAALTNDHLVALACLGGRPALDAVKKGLPHAPALIKRTNRRIPERTSHRVAASGGGGSGGGGSNGAIGGDLLLNFPDMSVLERQRAHLKYLNPTFDSPLAGFFADSSMITGGEMDLYPERLRRILTSYLSTAGLNLPMMYGETTVEGDSRLSISPETTLGTGNFKAAKFDTETKDCNEAAKKMTMNRDDLVEEGEEEKSKITEQNNGSTKSIKKMKHKAKKEENNFSNDSSKVTKELEKTDYIHVRARRGQATDSHSIAERVRREKISERMKFLQDLVPGCDKITGKAGMLDEIINYVQSLQRQIEFLSMKLAIVNPRPDFDMDDIFAKEVASTPMTVVPSPEMVLSGYSHEMVHSGYSSEMVNSGYLHVNPMQQVNTSSDPLSCFNNGEAPSMWDSHVQNLYGNLGV

SEQ ID NO: 165 - protein, 1198 aa, Artificial Sequence
  Description of Artificial Sequence: Synthetic polypeptide
YPYDVPDYASRTRLPSPPAPSPAFSADSFSDLLRQFDPSLFNTSLFDSLPPFGAHHTEAATGEWDEVQSGLRAADAPPPTMRVAVTAARPPRAKPAPRRRAAQPSDASPAAQVDLRTLGYSQQQQEKIKPKVRSTVAQHHEALVGHGFTHAHIVALSQHPAALGTVAVKYQDMIAALPEATHEAIVGVGKQWSGARALEALLTVAGELRGPPLQLDTGQLLKIAKRGGVTAVEAVHAWRNALTGAPLNLTPEQVVAIASNGGGKQALETVQRLLPVLCQAHGLTPEQVVAIASNNGGKQALETVQRLLPVLCQAHGLTPEQVVAIASNIGGKQALETVQRLLPVLCQAHGLTPEQVVAIASNIGGKQALETVQRLLPVLCQAHGLTPEQVVAIASNGGGKQALETVQRLLPVLCQAHGLTPEQVVAIASNNGGKQALETVQRLLPVLCQAHGLTPEQVVAIASNIGGKQALETVQRLLPVLCQAHGLTPEQVVAIASNGGGKQALETVQRLLPVLCQAHGLTPEQVVAIASNNGGKQALETVQRLLPVLCQAHGLTPEQVVAIASNIGGKQALETVQRLLPVLCQAHGLTPEQVVAIASNGGGKQALETVQRLLPVLCQAHGLTPEQVVAIASNIGGKQALETVQRLLPVLCQAHGLTPEQVVAIASNIGGKQALETVQRLLPVLCQAHGLTPEQVVAIASNGGGKQALETVQRLLPVLCQAHGLTPEQVVAIASNIGGKQALETVQRLLPVLCQAHGLTPEQVVAIASHDGGRPALESIVAQLSRPDPALAALTNDHLVALACLGGRPALDAVKKGLPHAPALIKRTNRRIPERTSHRVAASGGGGSGGGGSNGAIGGDLLLNFPDMSVLERQRAHLKYLNPTFDSPLAGFFADSSMITGGEMDSYLSTAGLNLPMMYGETTVEGLYPERLRRILTDSRLSISPETTLGTGNFKAAKFDTETKDCNEAAKKMTMNRDDLVEEGEEEKSKITEQNNGSTKSIKKMKHKAKKEENNFSNDSSKVTKELEKTDYIHVRARRGQATDSHSIAERVRREKISERMKFLQDLVPGCDKITGKAGMLDEIINYVQSLQRQIEFLSMKLAIVNPRPDFDMDDIFAKEVASTPMTVVPSPEMVLSGYSHEMVHSGYSSEMVNSGYLHVNPMQQVNTSSDPLSCFNNGEAPSMWDSHVQNLYGNLGV

SEQ ID NO: 166 - protein, 1200 aa, Artificial Sequence
  Description of Artificial Sequence: Synthetic polypeptide
YPYDVPDYASRTRLPSPPAPSPAFSADSFSDLLRQFDPSLFNTSLFDSLPPFGAHHTEAATGEWDEVQSGLRAADAPPPTMRVAVTAARPPRAKPAPRRRAAQPSDASPAAQVDLRTLGYSQQQQEKIKPKVRSTVAQHHEALVGHGFTHAHIVALSQHPAALGTVAVKYQDMIAALPEATHEAIVGVGKQWSGARALEALLTVAGELRGPPLQLDTGQLLKIAKRGGVTAVEAVHAWRNALTGAPLNLTPEQVVAIASNGGGKQALETVQRLLPVLCQAHGLTPEQVVAIASNNGGKQALETVQRLLPVLCQAHGLTPEQVVAIASNIGGKQALETVQRLLPVLCQAHGLTPEQVVAIASNIGGKQALETVQRLLPVLCQAHGLTPEQVVAIASNGGGKQALETVQRLLPVLCQAHGLTPEQVVAIASNNGGKQALETVQRLLPVLCQAHGLTPEQVVAIASNIGGKQALETVQRLLPVLCQAHGLTPEQVVAIASNGGGKQALETVQRLLPVLCQAHGLTPEQVVAIASNNGGKQALETVQRLLPVLCQAHGLTPEQVVAIASNIGGKQALETVQRLLPVLCQAHGLTPEQVVAIASNGGGKQALETVQRLLPVLCQAHGLTPEQVVAIASNIGGKQALETVQRLLPVLCQAHGLTPEQVVAIASNIGGKQALETVQRLLPVLCQAHGLTPEQVVAIASNGGGKQALETVQRLLPVLCQAHGLTPEQVVAIASNIGGKQALETVQRLLPVLCQAHGLTPEQVVAIASHDGGRPALESIVAQLSRPDPALAALTNDHLVALACLGGRPALDAVKKGLPHAPALIKRTNRRIPERTSHRVAASGGGGSGGGGSNGAIGGDLLLNFPDMSVLERQRAHLKYLNPTFDSPLAGFFADSSMITGGEMDSYLSTAGLNLPMMYGETTVEGDSRLSISPETTLGTGNFKAAKFDTETKDCNEAAAAKKMTMNRDDLVEEGLYPERLRRILTEEEKSKITEQNNGSTKSIKKMKHKAKKEENNFSNDSSKVTKELEKTDYIHVRARRGQATDSHSIAERVRREKISERMKFLQDLVPGCDKITGKAGMLDEIINYVQSLQRQIEFLSMKLAIVNPRPDFDMDDIFAKEVASTPMTVVPSPEMVLSGYSHEMVHSGYSSEMVNSGYLHVNPMQQVNTSSDPLSCFNNGEAPSMWDSHVQNLYGNLGV

SEQ ID NO: 167 - protein, 1198 aa, Artificial Sequence
  Description of Artificial Sequence: Synthetic polypeptide
YPYDVPDYASRTRLPSPPAPSPAFSADSFSDLLRQFDPSLFNTSLFDSLPPFGAHHTEAATGEWDEVQSGLRAADAPPPTMRVAVTAARPPRAKPAPRRRAAQPSDASPAAQVDLRTLGYSQQQQEKIKPKVRSTVAQHHEALVGHGFTHAHIVALSQHPAALGTVAVKYQDMIAALPEATHEAIVGVGKQWSGARALEALLTVAGELRGPPLQLDTGQLLKIAKRGGVTAVEAVHAWRNALTGAPLNLTPEQVVAIASNGGGKQALETVQRLLPVLCQAHGLTPEQVVAIASNNGGKQALETVQRLLPVLCQAHGLTPEQVVAIASNIGGKQALETVQRLLPVLCQAHGLTPEQVVAIASNIGGKQALETVQRLLPVLCQAHGLTPEQVVAIASNGGGKQALETVQRLLPVLCQAHGLTPEQVVAIASNNGGKQALETVQRLLPVLCQAHGLTPEQVVAIASNIGGKQALETVQRLLPVLCQAHGLTPEQVVAIASNGGGKQALETVQRLLPVLCQAHGLTPEQVVAIASNNGGKQALETVQRLLPVLCQAHGLTPEQVVAIASNIGGKQALETVQRLLPVLCQAHGLTPEQVVAIASNGGGKQALETVQRLLPVLCQAHGLTPEQVVAIASNIGGKQALETVQRLLPVLCQAHGLTPEQVVAIASNIGGKQALETVQRLLPVLCQAHGLTPEQVVAIASNGGGKQALETVQRLLPVLCQAHGLTPEQVVAIASNIGGKQALETVQRLLPVLCQAHGLTPEQVVAIASHDGGRPALESIVAQLSRPDPALAALTNDHLVALACLGGRPALDAVKKGLPHAPALIKRTNRRIPERTSHRVAASGGGGSGGGGSNGAIGGDLLLNFPDMSVLERQRAHLKYLNPTFDSPLAGFFADSSMITGGEMDSYLSTAGLNLPMMYGETTVEGDSRLSISPETTLGTGNFKAAKFDTETKDCNEAAKKMTMNRDDLVEEGEEEKSKITEQNNGSTKSIKKLYPERLRRILTMKHKAKKEENNFSNDSSKVTKELEKTDYIHVRARRGQATDSHSIAERVRREKISERMKFLQDLVPGCDKITGKAGMLDEIINYVQSLQRQIEFLSMKLAIVNPRPDFDMDDIFAKEVASTPMTVVPSPEMVLSGYSHEMVHSGYSSEMVNSGYLHVNPMQQVNTSSDPLSCFNNGEAPSMWDSHVQNLYGNLGV

SEQ ID NO: 168 - protein, 1198 aa, Artificial Sequence
  Description of Artificial Sequence: Synthetic polypeptide
YPYDVPDYASRTRLPSPPAPSPAFSADSFSDLLRQFDPSLFNTSLFDSLPPFGAHHTEAATGEWDEVQSGLRAADAPPPTMRVAVTAARPPRAKPAPRRRAAQPSDASPAAQVDLRTLGYSQQQQEKIKPKVRSTVAQHHEALVGHGFTHAHIVALSQHPAALGTVAVKYQDMIAALPEATHEAIVGVGKQWSGARALEALLTVAGELRGPPLQLDTGQLLKIAKRGGVTAVEAVHAWRNALTGAPLNLTPEQVVAIASNGGGKQALETVQRLLPVLCQAHGLTPEQVVAIASNNGGKQALETVQRLLPVLCQAHGLTPEQVVAIASNIGGKQALETVQRLLPVLCQAHGLTPEQVVAIASNIGGKQALETVQRLLPVLCQAHGLTPEQVVAIASNGGGKQALETVQRLLPVLCQAHGLTPEQVVAIASNNGGKQALETVQRLLPVLCQAHGLTPEQVVAIASNIGGKQALETVQRLLPVLCQAHGLTPEQVVAIASNGGGKQALETVQRLLPVLCQAHGLTPEQVVAIASNNGGKQALETVQRLLPVLCQAHGLTPEQVVAIASNIGGKQALETVQRLLPVLCQAHGLTPEQVVAIASNGGGKQALETVQRLLPVLCQAHGLTPEQVVAIASNIGGKQALETVQRLLPVLCQAHGLTPEQVVAIASNIGGKQALETVQRLLPVLCQAHGLTPEQVVAIASNGGGKQALETVQRLLPVLCQAHGLTPEQVVAIASNIGGKQALETVQRLLPVLCQAHGLTPEQVVAIASHDGGRPALESIVAQLSRPDPALAALTNDHLVALACLGGRPALDAVKKGLPHAPALIKRTNRRIPERTSHRVAASGGGGSGGGGSNGAIGGDLLLNFPDMSVLERQRAHLKYLNPTFDSPLAGFFADSSMITGGEMDSYLSTAGLNLPMMYGETTVEGDSRLSISPETTLGTGNFKAAKFDTETKDCNEAAKKMTMNRDDLVEEGEEEKSKITEQNNGSTKSIKKMKHKAKKEENNFSNDSSKVTLYPERLRRILTKELEKTDYIHVRARRGQATDSHSIAERVRREKISERMKFLQDLVPGCDKITGKAGMLDEIINYVQSLQRQIEFLSMKLAIVNPRPDFDMDDIFAKEVASTPMTVVPSPEMVLSGYSHEMVHSGYSSEMVNSGYLHVNPMQQVNTSSDPLSCFNNGEAPSMWDSHVQNLYGNLGV

SEQ ID NO: 169 - protein, 1165 aa, Artificial Sequence
  Description of Artificial Sequence: Synthetic polypeptide
MYPYDVPDYASRTRLPSPPAPSPAFSADSFSDLLRQFDPSLFNTSLFDSLPPFGAHHTEAATGEWDEVQSGLRAADAPPPTMRVAVTAARPPRAKPAPRRRAAQPSDASPAAQVDLRTLGYSQQQQEKIKPKVRSTVAQHHEALVGHGFTHAHIVALSQHPAALGTVAVKYQDMIAALPEATHEAIVGVGKQWSGARALEALLTVAGELRGPPLQLDTGQLLKIAKRGGVTAVEAVHAWRNALTGAPLNLTPEQVVAIASNGGGKQALETVQRLLPVLCQAHGLTPEQVVAIASNNGGKQALETVQRLLPVLCQAHGLTPEQVVAIASNIGGKQALETVQRLLPVLCQAHGLTPEQVVAIASNIGGKQALETVQRLLPVLCQAHGLTPEQVVAIASNGGGKQALETVQRLLPVLCQAHGLTPEQVVAIASNNGGKQALETVQRLLPVLCQAHGLTPEQVVAIASNIGGKQALETVQRLLPVLCQAHGLTPEQVVAIASNGGGKQALETVQRLLPVLCQAHGLTPEQVVAIASNNGGKQALETVQRLLPVLCQAHGLTPEQVVAIASNIGGKQALETVQRLLPVLCQAHGLTPEQVVAIASNGGGKQALETVQRLLPVLCQAHGLTPEQVVAIASNIGGKQALETVQRLLPVLCQAHGLTPEQVVAIASNIGGKQALETVQRLLPVLCQAHGLTPEQVVAIASNGGGKQALETVQRLLPVLCQAHGLTPEQVVAIASNIGGKQALETVQRLLPVLCQAHGLTPEQVVAIASHDGGRPALESIVAQLSRPDPALAALTNDHLVALACLGGRPALDAVKKGLPHAPALIKRTNRRIPERTSHRVAASSPKKKRKVEASNGAIGGDLLLNFPDMSVLERQRAHLKYLNPTFDSPLAGFFADSSMITGGEMDSYLSTAGLNLPMMYGETTVEGDSRLSISPETTLGTGNFKKRKFDTETKDCNEKKKKMTMNRDDLVEEGEEEKSKITEQNNGSTKSIKKMKHKAKKEENNFSNDSSKVTKELEKTDYIHVRARRGQATDSHSIAERVRREKISERMKFLQDLVPGCDKITGKAGMLDEIINYVQSLQRGGSVASTPMTVVPSPEMVLSGYSHEMVHSGYSSEMVNSGYLHVNPMQQVNTSSDPLSCFNNGEAPSMWDSHVQNLYGNLGV

SEQ ID NO: 170 - protein, 1159 aa, Artificial Sequence
  Description of Artificial Sequence: Synthetic polypeptide
YPYDVPDYASRTRLPSPPAPSPAFSADSFSDLLRQFDPSLFNTSLFDSLPPFGAHHTEAATGEWDEVQSGLRAADAPPPTMRVAVTAARPPRAKPAPRRRAAQPSDASPAAQVDLRTLGYSQQQQEKIKPKVRSTVAQHHEALVGHGFTHAHIVALSQHPAALGTVAVKYQDMIAALPEATHEAIVGVGKQWSGARALEALLTVAGELRGPPLQLDTGQLLKIAKRGGVTAVEAVHAWRNALTGAPLNLTPEQVVAIASNGGGKQALETVQRLLPVLCQAHGLTPEQVVAIASNNGGKQALETVQRLLPVLCQAHGLTPEQVVAIASNIGGKQALETVQRLLPVLCQAHGLTPEQVVAIASNIGGKQALETVQRLLPVLCQAHGLTPEQVVAIASNGGGKQALETVQRLLPVLCQAHGLTPEQVVAIASNNGGKQALETVQRLLPVLCQAHGLTPEQVVAIASNIGGKQALETVQRLLPVLCQAHGLTPEQVVAIASNGGGKQALETVQRLLPVLCQAHGLTPEQVVAIASNNGGKQALETVQRLLPVLCQAHGLTPEQVVAIASNIGGKQALETVQRLLPVLCQAHGLTPEQVVAIASNGGGKQALETVQRLLPVLCQAHGLTPEQVVAIASNIGGKQALETVQRLLPVLCQAHGLTPEQVVAIASNIGGKQALETVQRLLPVLCQAHGLTPEQVVAIASNGGGKQALETVQRLLPVLCQAHGLTPEQVVAIASNIGGKQALETVQRLLPVLCQAHGLTPEQVVAIASHDGGRPALESIVAQLSRPDPALAALTNDHLVALACLGGRPALDAVKKGLPHAPALIKRTNRRIPERTSHRVAASSPKKKRKVEASNGAIGGDLLLNFPDMSVLERQRAHLKYLNPTFDSPLAGFFADSSMITGGEMDSYLSTAGLNLPMMYGETTVEGDSRLSISPETTLGTGNFKKRKFDTETKDCNEKKKKMTMNRDDLVEEGEEEKSKITEQNNGSTKSIKKMKHKAKKEENNFSNDSSKVTKELEKTDYIHVRARRGQATDSHSIAERVRREKISERMKFLQDLVPGCDKITGKAGMLDEIINYVQSLQRQIEFLSMKLAIVNPRPDFDMDDIFAKEVASTPMTVVPSPEMVLSGYGGSPLSCFNNGEAPSMWDSHVQNLYGNLGV

SEQ ID NO: 171 - protein, 846 aa, Artificial Sequence
  Description of Artificial Sequence: Synthetic polypeptide
MKRPAATKKAGQAKKKKKMDKKTIVWFRRDLRIEDNPALAAAAHEGSVFPVFIWCPEEEGQFYPGRASRWWMKQSLAHLSQSLKALGSDLTLIKTHNTISAILDCIRVTGATKVVFNHLYDPVSLVRDHTVKEKLVERGISVQSYNGDLLYEPWEIYCEKGKPFTSFNSYWKKCLDMSIESVMLPPPWRLMPITAAAEAIWACSIEELGLENEAEKPSNALLTRAWSPGWSNADKLLNEFIEKQLIDYAKNSKKVVGNSTSLLSPYLHFGEISVRHVFQCARMKQIIWARDKNSEGEESADLFLRGIGLREYSRYICFNFPFTHEQSLLSHLRFFPWDADVDKFKAWRQGRTGYPLVDAGMRELWATGWMHNRIRVIVSSFAVKFLLLPWKWGMKYFWDTLLDADLECDILGWQYISGSIPDGHELDRLDNPALQGAKYDPEGEYIRQWLPELARLPTEWIHHPWDAPLTVLKASGVELGTNYAKPIVDIDTARELLAKAISRTREAQIMIGAAPASPKKKRKVEASGSGRADALDDFDLDMLGSDALDDFDLDMLGSDALDDFDLDMLGSDALDDFDLDMLINSRGSGEGRGSLLTCGDVEENPGPVSKGEELFTGVVPILVELDGDVNGHKFSVSGEGEGDATYGKLTLKFICTTGKLPVPWPTLVTTLTYGVQCFSRYPDHMKQHDFFKSAMPEGYVQERTIFFKDDGNYKTRAEVKFEGDTLVNRIELKGIDFKEDGNILGHKLEYNYNSHNVYIMADKQKNGIKVNFKIRHNIEDGSVQLADHYQQNTPIGDGPVLLPDNHYLSTQSALSKDPNEKRDHMVLLEFVTAAGITLGMDELYKV

SEQ ID NO: 172 - protein, 840 aa, Artificial Sequence
  Description of Artificial Sequence: Synthetic polypeptide
MEQKLISEEDLKMDKKTIVWFRRDLRIEDNPALAAAAHEGSVFPVFIWCPEEEGQFYPGRASRWWMKQSLAHLSQSLKAAGSDATLIKTHNTISAILDCIRVTGATKVVFNHLYDPVSLVRDHTVKEKLVERGISVQSYNGDLLYEPWEIYCEKGKPFTSFNSYWKKCLDMSIESVMLPPPWRLMPITAAAEAIWACSIEELGLENEAEKPSNALLTRAWSPGWSNADKLLNEFIEKQLIDYAKNSKKVVGNSTSLLSPYLHFGEISVRHVFQCARMKQIIWARDKNSEGEESADLFLRGIGLREYSRYICFNFPFTHEQSLLSHLRFFPWDADVDKFKAWRQGRTGYPLVDAGMRELWATGWMHNRIRVIVSSFAVKFLLLPWKWGMKYFWDTLLDADLECDILGWQYISGSIPDGHELDRLDNPALQGAKYDPEGEYIRQWLPELARLPTEWIHHPWDAPLTVLKASGVELGTNYAKPIVDIDTARELLAKAISRTREAQIMIGAAPASPKKKRKVEASGSGRADALDDFDLDMLGSDALDDFDLDMLGSDALDDFDLDMLGSDALDDFDLDMLINSRGSGEGRGSLLTCGDVEENPGPVSKGEELFTGVVPILVELDGDVNGHKFSVSGEGEGDATYGKLTLKFICTTGKLPVPWPTLVTTLTYGVQCFSRYPDHMKQHDFFKSAMPEGYVQERTIFFKDDGNYKTRAEVKFEGDTLVNRIELKGIDFKEDGNILGHKLEYNYNSHNVYIMADKQKNGIKVNFKIRHNIEDGSVQLADHYQQNTPIGDGPVLLPDNHYLSTQSALSKDPNEKRDHMVLLEFVTAAGITLGMDELYKV

SEQ ID NO: 173 - protein, 841 aa, Artificial Sequence
  Description of Artificial Sequence: Synthetic polypeptide
MKMDKKTIVWFRRDLRIEDNPALAAAAHEGSVFPVFIWCPEEEGQFYPGRASRWWMKQSLAHLSQSLKALGSDLTLIKTHNTISAILDCIRVTGATKVVFNHLYDPVSLVRDHTVKEKLVERGISVQSYNGDLLYEPWEIYCEKGKPFTSFNSYWKKCLDMSIESVMLPPPWRLMPITAAAEAIWACSIEELGLENEAEKPSNALLTRAWSPGWSNADKLLNEFIEKQLIDYAKNSKKVVGNSTSLLSPYLHFGEISVRHVFQCARMKQIIWARDKNSEGEESADLFLRGIGLREYSRYICFNFPFTHEQSLLSHLRFFPWDADVDKFKAWRQGRTGYPLVDAGMRELWATGWMHNRIRVIVSSFAVKFLLLPWKWGMKYFWDTLLDADLECDILGWQYISGSIPDGHELDRLDNPALQGAKYDPEGEYIRQWLPELARLPTEWIHHPWDAPLTVLKASGVELGTNYAKPIVDIDTARELLAKAISRTREAQIMIGAAPASPKKKRKVEASGSGRADALDDFDLDMLGSDALDDFDLDMLGSDALDDFDLDMLGSDALDDFDLDMLINSPKKKRKVEASSRGSGEGRGSLLTCGDVEENPGPVSKGEELFTGVVPILVELDGDVNGHKFSVSGEGEGDATYGKLTLKFICTTGKLPVPWPTLVTTLTYGVQCFSRYPDHMKQHDFFKSAMPEGYVQERTIFFKDDGNYKTRAEVKFEGDTLVNRIELKGIDFKEDGNILGHKLEYNYNSHNVYIMADKQKNGIKVNFKIRHNIEDGSVQLADHYQQNTPIGDGPVLLPDNHYLSTQSALSKDPNEKRDHMVLLEFVTAAGITLGMDELYKV

SEQ ID NO: 174 - protein, 954 aa, Artificial Sequence
  Description of Artificial Sequence: Synthetic polypeptide
MSRTRLPSPPAPSPAFSADSFSDLLRQFDPSLFNTSLFDSLPPFGAHHTEAATGEWDEVQSGLRAADAPPPTMRVAVTAARPPRAKPAPRRRAAQPSDASPAAQVDLRTLGYSQQQQEKIKPKVRSTVAQHHEALVGHGFTHAHIVALSQHPAALGTVAVKYQDMIAALPEATHEAIVGVGKQWSGARALEALLTVAGELRGPPLQLDTGQLLKIAKRGGVTAVEAVHAWRNALTGAPLNLTPEQVVAIASHNGGKQALETVQRLLPVLCQAHGLTPEQVVAIASNIGGKQALETVQRLLPVLCQAHGLTPEQVVAIASNIGGKQALETVQRLLPVLCQAHGLTPEQVVAIASNGGGKQALETVQRLLPVLCQAHGLTPEQVVAIASHNGGKQALETVQRLLPVLCQAHGLTPEQVVAIASNIGGKQALETVQRLLPVLCQAHGLTPEQVVAIASNGGGKQALETVQRLLPVLCQAHGLTPEQVVAIASHNGGKQALETVQRLLPVLCQAHGLTPEQVVAIASNIGGKQALETVQRLLPVLCQAHGLTPEQVVAIASNGGGKQALETVQRLLPVLCQAHGLTPEQVVAIASNIGGKQALETVQRLLPVLCQAHGLTPEQVVAIASNIGGKQALETVQRLLPVLCQAHGLTPEQVVAIASNGGGRPALESIVAQLSRPDPALAALTNDHLVALACLGGRPALDAVKKGLPHAPALIKRTNRRIPERTSHRVAASMANSESSSSPVNEEENSQRISTLHHQTMPSDLTQDEFTQLSQSIAEFHTYQLGNGRCSSLLAQRIHAPPETVWSVVRRFDRPQIYKHFIKSCNVSEDFEMRVGCTRDVNVISGLPANTSRERLDLLDDDRRVTGFSITGGEHRLRNYKSVTTVHRFEKEEEEERIWTVVLESYVVDVPEGNSEEDTRLFADTVIRLNLQKLASITEAMNRNNNNNNSSQVR

SEQ ID NO: 175 - protein, 379 aa, Artificial Sequence
  Description of Artificial Sequence: Synthetic polypeptide
MVPLYGFTSICGRRPEMEAAVSTIPRFLQSSSGSMLDGRFDPQSAAHFFGVYDGHGGSQVANYCRERMHLALAEEIAKEKPMLCDGDTWLEKWKKALFNSFLRVDSEIESVAPETVGSTSVVAVVFPSHIFVANCGDSRAVLCRGKTALPLSVDHKPDREDEAARIEAAGGKVIQWNGARVFGVLAMSRSIGDRYLKPSIIPDPEVTAVKRVKEDDCLILASDGVWDVMTDEEACEMARKRILLWHKKNAVAGDASLLADERRKEGKDPAAMSAAEYLSKLAIQRGSKDNISVVVVDLKPRRKLKSKPLNASPKKKRKVEASGSGRADALDDFDLDMLGSDALDDFDLDMLGSDALDDFDLDMLGSDALDDFDLDMLIN

SEQ ID NO: 176 - protein, 1453 aa, Artificial Sequence
  Description of Artificial Sequence: Synthetic polypeptide
MDKKYSIGLAIGTNSVGWAVITDEYKVPSKKFKVLGNTDRHSIKKNLIGALLFDSGETAEATRLKRTARRRYTRRKNRICYLQEIFSNEMAKVDDSFFHRLEESFLVEEDKKHERHPIFGNIVDEVAYHEKYPTIYHLRKKLVDSTDKADLRLIYLALAHMIKFRGHFLIEGDLNPDNSDVDKLFIQLVQTYNQLFEENPINASGVDAKAILSARLSKSRRLENLIAQLPGEKKNGLFGNLIALSLGLTPNFKSNFDLAEDAKLQLSKDTYDDDLDNLLAQIGDQYADLFLAAKNLSDAILLSDILRVNTEITKAPLSASMIKRYDEHHQDLTLLKALVRQQLPEKYKEIFFDQSKNGYAGYIDGGASQEEFYKFIKPILEKMDGTEELLVKLNREDLLRKQRTFDNGSIPHQIHLGELHAILRRQEDFYPFLKDNREKIEKILTFRIPYYVGPLARGNSRFAWMTRKSEETITPWNFEEVVDKGASAQSFIERMTNFDKNLPNEKVLPKHSLLYEYFTVYNELTKVKYVTEGMRKPAFLSGEQKKAIVDLLFKTNRKVTVKQLKEDYFKKIECFDSVEISGVEDRFNASLGTYHDLLKIIKDKDFLDNEENEDILEDIVLTLTLFEDREMIEERLKTYAHLFDDKVMKQLKRRRYTGWGRLSRKLINGIRDKQSGKTILDFLKSDGFANRNFMQLIHDDSLTFKEDIQKAQVSGQGDSLHEHIANLAGSPAIKKGILQTVKVVDELVKVMGRHKPENIVIEMARENQTTQKGQKNSRERMKRIEEGIKELGSQILKEHPVENTQLQNEKLYLYYLQNGRDMYVDQELDINRLSDYDVDAIVPQSFLKDDSIDNKVLTRSDKNRGKSDNVPSEEVVKKMKNYWRQLLNAKLITQRKFDNLTKAERGGLSELDKAGFIKRQLVETRQITKHVAQILDSRMNTKYDENDKLIREVKVITLKSKLVSDFRKDFQFYKVREINNYHHAHDAYLNAVVGTALIKKYPKLESEFVYGDYKVYDVRKMIAKSEQEIGKATAKYFFYSNIMNFFKTEITLANGEIRKRPLIETNGETGEIVWDKGRDFATVRKVLSMPQVNIVKKTEVQTGGFSKESILPKRNSDKLIARKKDWDPKKYGGFDSPTVAYSVLVVAKVEKGKSKKLKSVKELLGITIMERSSFEKNPIDFLEAKGYKEVKKDLIIKLPKYSLFELENGRKRMLASAGELQKGNELALPSKYVNFLYLASHYEKLKGSPEDNEQKQLFVEQHKHYLDEIIEQISEFSKRVILADANLDKVLSAYNKHRDKPIREQAENIIHLFTLTNLGAPAAFKYFDTTIDRKRYTSTKEVLDATLIHQSITGLYETRIDLSQLGGDSAGGGGSGGGGSGGGGSGPKKKRKVAAAGSGRADALDDFDLDMLGSDALDDFDLDMLGSDALDDFDLDMLGSDALDDFDLDMLIN

SEQ ID NO: 177 - protein, 1569 aa, Artificial Sequence
  Description of Artificial Sequence: Synthetic polypeptide
MGSGMNIQMLLEAADYLERREREAEHGYASMLPGSGMNIQMLLEAADYLERREREAEHGYASMLPGSGMNIQMLLEAADYLERREREAEHGYASMLPGSGMNIQMLLEAADYLERREREAEHGYASMLPSRSAGPKKKRKVAAADYKDDDDKSRLEPGEKPYKCPECGKSFSQSGALTRHQRTHTRDKKYSIGLAIGTNSVGWAVITDEYKVPSKKFKVLGNTDRHSIKKNLIGALLFDSGETAEATRLKRTARRRYTRRKNRICYLQEIFSNEMAKVDDSFFHRLEESFLVEEDKKHERHPIFGNIVDEVAYHEKYPTIYHLRKKLVDSTDKADLRLIYLALAHMIKFRGHFLIEGDLNPDNSDVDKLFIQLVQTYNQLFEENPINASGVDAKAILSARLSKSRRLENLIAQLPGEKKNGLFGNLIALSLGLTPNFKSNFDLAEDAKLQLSKDTYDDDLDNLLAQIGDQYADLFLAAKNLSDAILLSDILRVNTEITKAPLSASMIKRYDEHHQDLTLLKALVRQQLPEKYKEIFFDQSKNGYAGYIDGGASQEEFYKFIKPILEKMDGTEELLVKLNREDLLRKQRTFDNGSIPHQIHLGELHAILRRQEDFYPFLKDNREKIEKILTFRIPYYVGPLARGNSRFAWMTRKSEETITPWNFEEVVDKGASAQSFIERMTNFDKNLPNEKVLPKHSLLYEYFTVYNELTKVKYVTEGMRKPAFLSGEQKKAIVDLLFKTNRKVTVKQLKEDYFKKIECFDSVEISGVEDRFNASLGTYHDLLKIIKDKDFLDNEENEDILEDIVLTLTLFEDREMIEERLKTYAHLFDDKVMKQLKRRRYTGWGRLSRKLINGIRDKQSGKTILDFLKSDGFANRNFMQLIHDDSLTFKEDIQKAQVSGQGDSLHEHIANLAGSPAIKKGILQTVKVVDELVKVMGRHKPENIVIEMARENQTTQKGQKNSRERMKRIEEGIKELGSQILKEHPVENTQLQNEKLYLYYLQNGRDMYVDQELDINRLSDYDVDAIVPQSFLKDDSIDNKVLTRSDKNRGKSDNVPSEEVVKKMKNYWRQLLNAKLITQRKFDNLTKAERGGLSELDKAGFIKRQLVETRQITKHVAQILDSRMNTKYDENDKLIREVKVITLKSKLVSDFRKDFQFYKVREINNYHHAHDAYLNAVVGTALIKKYPKLESEFVYGDYKVYDVRKMIAKSEQEIGKATAKYFFYSNIMNFFKTEITLANGEIRKRPLIETNGETGEIVWDKGRDFATVRKVLSMPQVNIVKKTEVQTGGFSKESILPKRNSDKLIARKKDWDPKKYGGFDSPTVAYSVLVVAKVEKGKSKKLKSVKELLGITIMERSSFEKNPIDFLEAKGYKEVKKDLIIKLPKYSLFELENGRKRMLASAGELQKGNELALPSKYVNFLYLASHYEKLKGSPEDNEQKQLFVEQHKHYLDEIIEQISEFSKRVILADANLDKVLSAYNKHRDKPIREQAENIIHLFTLTNLGAPAAFKYFDTTIDRKRYTSTKEVLDATLIHQSITGLYETRIDLSQLGGDKRPAATKKAGQAKKKK

SEQ ID NO: 178 - protein, 84 aa, Artificial Sequence
  Description of Artificial Sequence: Synthetic polypeptide
ASSPKKKRKVEASMNGLMEDPMKVYKDRQFMNVWTDHEKEIFKDKFIQHPKNFGLIASYLERKSVPDCVLYYYLTKKNENYKEF

SEQ ID NO: 179 - protein, 288 aa, Artificial Sequence
  Description of Artificial Sequence: Synthetic polypeptide
ASSPKKKRKVEASMGNLMISFLKKDTQSITLEELAKIIKKCKHVVALTGSGTSAESNIPSFRGSSNSIWSKYDPRIYGTIWGFWKYPEKIWEVIRDISSDYEIEINNGHVALSTLESLGYLKSVVTQNVDGLHEASGNTKVISLHGNVFEAVCCTCNKIVKLNKIMLQKTSHFMHQLPPECPCGGIFKPNIILFGEVVSSDLLKEAEEEIAKCDLLLVIGTSSTVSTATNLCHFACKKKKKIVEINISKTYITNKMSDYHVCAKFSELTKVANILKGSSEKNKKIMEF

SEQ ID NO: 180 - protein, 346 aa, Artificial Sequence
  Description of Artificial Sequence: Synthetic polypeptide
ASSPKKKRKVEASMEKAFRPHFFNHGKPDANPKEKKNCHWCQIRSFATHAQLPISIVNREDDAFLNPNFRFIDHSIIGKNVPVADQSFRVGCSCASDEECMYSTCQCLDEMAPDSDEEADPYTRKKRFAYYSQGAKKGLLRDRVLQSQEPIYECHQGCACSKDCPNRVVERGRTVPLQIFRTKDRGWGVKCPVNIKRGQFVDRYLGEIITSEEADRRRAESTIARRKDVYLFALDKFSDPDSLDPLLAGQPLEVDGEYMSGPTRFINHSCDPNMAIFARVGDHADKHIHDLALFAIKDIPKGTELTFDYVNGLTGLESDAHDPSKISEMTKCLCGTAKCRGYLWEF

SEQ ID NO: 181 - protein, 306 aa, Artificial Sequence
  Description of Artificial Sequence: Synthetic polypeptide
ASSPKKKRKVEASTEMSVRKIAAHMKSNPNAKVIFMVGAGISTSCGIPDFRSPGTGLYHNLARLKLPYPEAVFDVDFFQSDPLPFYTLAKELYPGNFRPSKFHYLLKLFQDKDVLKRVYTQNIDTLERQAGVKDDLIIEAHGSFAHCHCIGCGKVYPPQVFKSKLAEHPIKDFVKCDVCGELVKPAIVFFGEDLPDSFSETWLNDSEWLREKITTSGKHPQQPLVIVVGTSLAVYPFASLPEEIPRKVKRVLCNLETVGDFKANKRPTDLIVHQYSDEFAEQLVEELGWQEDFEKILTAQGGMGEF

SEQ ID NO: 182 - protein, 272 aa, Artificial Sequence
  Description of Artificial Sequence: Synthetic polypeptide
ASSPKKKRKVEASMVGAGISTPSGIPDFRSPGSGLYSNLQQYDLPYPEAIFELPFFFHNPKPFFTLAKELYPGNYKPNVTHYFLRLLHDKGLLLRLYTQNIDGLERVSGIPASKLVEAHGTFASATCTVCQRPFPGEDIRADVMADRVPRCPVCTGVVKPDIVFFGEPLPQRFLLHVVDFPMADLLLILGTSLEVEPFASLTEAVRSSVPRLLINRDLVGPLAWHPRSRDVAQLGDVVHGVESLVELLGWTEEMRDLVQRETGKLDGPDKEF

SEQ ID NO: 183 - protein, 344 aa, Artificial Sequence
  Description of Artificial Sequence: Synthetic polypeptide
ASSPKKKRKVEASMAAAANSGSSLPLFDCPTWAGKPPPGLHLDVVKGDKLIEKLIIDEKKYYLFGRNPDLCDFTIDHQSCSRVHAALVYHKHLKRVFLIDLNSTHGTFLGHIRLEPHKPQQIPIDSTVSFGASTRAYTLREKPQTLPSAVKGDEKMGGEDDELKGLLGLPEEETELDNLTEFNTAHNKRISTLTIEEGNLDIQRPKRKRKNSRVTFSEDDEIINPEDVDPSVGRFRNMVQTAVVPVKKKRVEGPGSLGLEESGSRRMQNFAFSGGLYGGLPPTHSEAGSQPHGIHGTALIGGLPMPYPNLAPDVDLTPVVPSAVNMNPAPNPAVYNPEAVNEEF

SEQ ID NO: 184 - protein, 234 aa, Artificial Sequence
  Description of Artificial Sequence: Synthetic polypeptide
ASSPKKKRKVEASMTTNSTQDTLYLSLHGGIDSAIPYPVRRVEQLLQFSFLPELQFQNAAVKQRIQRLCYREEKRLAVSSLAKWLGQLHKQRLRAPKNPPVAICWINSYVGYGVFARESIPAWSYIGEYTGILRRRQALWLDENDYCFRYPVPRYSFRYFTIDSGMQGNVTRFINHSDNPNLEAIGAFENGIFHIIIRAIKDILPGEELCYHYGPLYWKHRKKREEFVPQEEEF

SEQ ID NO: 185 - protein, 233 aa, Artificial Sequence
  Description of Artificial Sequence: Synthetic polypeptide
ASSPKKKRKVEASARYLGNTVDLSSFDFRTGKMMPSKLQKNKQRLRNDPLNQNKGKPDLNTTLPIRQTASIFKQPVTKVTNHPSNKVKSDPQRMNEQPRQLFWEKRLQGLSASDVTEQIIKTMELPKGLQGVGPGSNDETLLSAVASALHTSSAPITGQVSAAVEKNPAVWLNTSQPLCKAFIVTDEDIRKQEERVQQVRKILEDALMADILSRAADTEEMDIEMDSGDEAEF

SEQ ID NO: 186 - protein, 346 aa, Artificial Sequence
  Description of Artificial Sequence: Synthetic polypeptide
ASSPKKKRKVEASMPSLDDILKPVAEAVKNGKKVTFFNGAGISTGAGIPDFRSPDTGLYANLAKLNLPFAEAVFDIDFFKEDPKPFYTLAEELYPGNFAPTKFHHFIKLLQDQGSLKRVYTQNIDTLERLAGVEDKYIVEAHGSFASNHCVDCHKEMTTETLKTYMKDKKIPSCQHCEGYVKPDIVFFGEGLPVKFFDLWEDDCEDVEVAIVAGTSLTVFPFASLPGEVNKKCLRVLVNKEKVGTFKHEPRKSDIIALHDCDIVAERLCTLLGLDDKLNEVYEKEKIKYSKAETKEIKMHEIEDKLKEEAHLKEDKHTTKVDKKEKQNDANDKELEQLIDKAKAEF

SEQ ID NO: 187 - protein, 350 aa, Artificial Sequence
  Description of Artificial Sequence: Synthetic polypeptide
ASSPKKKRKVEASMENRALDPGTRDSYGATSHLPNKGALAKVKNNFKDLMSKLTEGQYVLCRWTDGLYYLGKIKRVSSSKQSCLVTFEDNSKYWVLWKDIQHAGVPGEEPKCNICLGKTSGPLNEILICGKCGLGYHQQCHIPIAGSADQPLLTPWFCRRCIFALAVRKGGALKKGAIARTLQAVKMVLSYQPEELEWDSPHRTNQQQCYCYCGGPGEWYLRMLQCYRCRQWFHEACTQCLNEPMMFGDRFYLFFCSVCNQGPGGSGSDSSAEGASVPERPDEGIDSHTFESISEDDSSLSHLKSSITNYFGAAGRLACGEKYQVLARRVTPEGKVQYLVEWEGTTPYEF

SEQ ID NO: 188 - protein, 362 aa, Artificial Sequence
  Description of Artificial Sequence: Synthetic polypeptide
ASSPKKKRKVEASMLHTTQLYQHVPETRWPIVYSPRYNITFMGLEKLHPFDAGKWGKVINFLKEEKLLSDSMLVEAREASEEDLLVVHTRRYLNELKWSFAVATITEIPPVIFLPNFLVQRKVLRPLRTQTGGTIMAGKLAVERGWAINVGGGFHHCSSDRGGGFCAYADITLAIKFLFERVEGISRATIIDLDAHQGNGHERDFMDDKRVYIMDVYNRHIYPGDRFAKQAIRRKVELEWGTEDDEYLDKVERNIKKSLQEHLPDVVVYNAGTDILEGDRLGGLSISPAGIVKRDELVFRMVRGRRVPILMVTSGGYQKRTARIIADSILNLFGLGLIGPESPSVSAQNSDTPLLPPAVPEF

SEQ ID NO: 189 - protein, 315 aa, Artificial Sequence
  Description of Artificial Sequence: Synthetic polypeptide
ASSPKKKRKVEASMPLQIVHHPDYDAGFATNHRFPMSKYPLLMEALRARGLASPDALNTTEPAPASWLKLAHAADYVDQVISCSVPEKIEREIGFPVGPRVSLRAQLATGGTILAARLALRHGIACNTAGGSHHARRAQGAGFCTFNDVAVASLVLLDEGAAQNILVVDLDVHQGDGTADILSDEPGVFTFSMHGERNYPVRKIASDLDIALPDGTGDAAYLRRLATILPELSARARWDIVFYNAGVDVHAEDRLGRLALSNGGLRARDEMVIGHFRALGIPVCGVIGGGYSTDVPALASRHAILFEVASTYAEF

SEQ ID NO: 190 - protein, 134 aa, Artificial Sequence
  Description of Artificial Sequence: Synthetic polypeptide
ASSPKKKRKVEASMFNDRVIVKKSPLGGYGVFARKSFEKGELVEECLCIVRHNDDWGTALEDYLFSRKNMSAMALGFGAIFNHSKDPNARHELTAGLKRMRIFTIKPIAIGEEITISYGDDYWLSRPRLTQNEF

SEQ ID NO: 191 - protein, 282 aa, Artificial Sequence
  Description of Artificial Sequence: Synthetic polypeptide
ASSPKKKRKVEASDISGGLEFKGIPATNRVDDSPVSPTSGFTYIKSLIIEPNVIIPKSSTGCNCRGSCTDSKKCACAKLNGGNFPYVDLNDGRLIESRDVVFECGPHCGCGPKCVNRTSQKRLRFNLEVFRSAKKGWAVRSWEYIPAGSPVCEYIGVVRRTADVDTISDNEYIFEIDCQQTMQGLGGRQRRLRDVAVPMNNGVSQSSEDENAPEFCIDAGSTGNFARFINHSCEPNLFVQCVLSSHQDIRLARVVLFAADNISPMQELTYDYGYALDSVHEF

SEQ ID NO: 192 - protein, 319 aa, Artificial Sequence
  Description of Artificial Sequence: Synthetic polypeptide
ASSPKKKRKVEASASRRTGEFLRDAQAPSRWLKRSKTGQDDGAFCLETWLAGAGDDAAGGERGRDREGAADKAKQREERRQKELEERFEEMKVEFEEKAQRMIARRAALTGEIYSDGKGSKKPRVPSLPENDDDALIEIIIDPEQGILKWPLSVMSIRQRTVIYQECLRRDLTACIHLTKVPGKGRAVFAADTILKDDFVVEYKGELCSEREAREREQRYNRSKVPMGSFMFYFKNGSRMMAIDATDEKQDFGPARLINHSRRNPNMTPRAITLGDFNSEPRLIFVARRNIEKGEELLVDYGERDPDVIKEHPWLNSEF

SEQ ID NO: 193 - protein, 304 aa, Artificial Sequence
  Description of Artificial Sequence: Synthetic polypeptide
ASSPKKKRKVEASMSVNYAAGLSPYADKGKCGLPEIFDPPEELERKVWELARLVWQSSSVVFHTGAGISTASGIPDFRGPHGVWTMEERGLAPKFDTTFESARPTQTHMALVQLERVGLLRFLVSQNVDGLHVRSGFPRDKLAELHGNMFVEECAKCKTQYVRDTVVGTMGLKATGRLCTVAKARGLRACRGELRDTILDWEDSLPDRDLALADEASRNADLSITLGTSLQIRPSGNLPLATKRRGGRLVIVNLQPTKHDRHADLRIHGYVDEVMTRLMKHLGLEIPAWDGPRVLERALPPLEF

SEQ ID NO: 194 - protein, 257 aa, Artificial Sequence
  Description of Artificial Sequence: Synthetic polypeptide
ASSPKKKRKVEASMKVAAKKLATSRMRKDRAAAASPSSDIENSENPSSLASHSSSSGRMTPSKNTRSRKGVSVKDVSNHKITEFFQVRRSNRKTSKQISDEAKHALRDTVLKGTNERLLEVYKDVVKGRGIRTKVNFEKGDFVVEYRGVMMEYSEAKVIEEQYSNDEEIGSYMYFFEHNNKKWCIDATKESPWKGRLINHSVLRPNLKTKVVEIDGSHHLILVARRQIAQGEELLYDYGDRSAETIAKNPWLVNTEF

SEQ ID NO: 195 - protein, 310 aa, Artificial Sequence
  Description of Artificial Sequence: Synthetic polypeptide
ASSPKKKRKVEASVRTEKIICRDVARGYENVPIPCVNGVDGEPCPEDYKYISENCETSTMNIDRNITHLQHCTCVDDCSSSNCLCGQLSIRCWYDKDGRLLQEFNKIEPPLIFECNQACSCWRSCKNRVVQSGIKVRLQLYRTAKMGWGVRALQTIPQGTFICEYVGELISDAEADVREDDSYLFDLDNKDGEVYCIDARYYGNISRFINHLCDPNIIPVRVFMLHQDLRFPRIAFFSSRDIRTGEELGFDYGDRFWDIKSKYFTCQCGSEKCKHSAEAIALEQSRLARLDPHPELLPDLSSLPPINTEF

SEQ ID NO: 196 - protein, 289 aa, Artificial Sequence
  Description of Artificial Sequence: Synthetic polypeptide
ASSPKKKRKVEASSSSMADFRKFFAKAKHIVIISGAGVSAESGVPTFRGAGGYWRKWQAQDLATPLAFAHNPSRVWEFYHYRREVMGSKEPNAGHRAIAECETRLGKQGRRVVVITQNIDELHRKAGTKNLLEIHGSLFKTRCTSCGVVAENYKSPICPALSGKGAPEPGTQDASIPVEKLPRCEEAGCGGLLRPHVVWFGENLDPAILEEVDRELAHCDLCLVVGTSSVVYPAAMFAPQVAARGVPVAEFNTETTPATNRFRFHFQGPCGTTLPEALACHENETVSEF

SEQ ID NO: 197 - protein, 340 aa, Artificial Sequence
  Description of Artificial Sequence: Synthetic polypeptide
ASSPKKKRKVEASMSRVVKPKVASMEEMAAFHTDAYLQHLHKVSEEGDNDDPETLEYGLGYDCPITEGIYDYAAAVGGATLTAAEQLIEGKTRIAVNWPGGWHHAKKDEASGFCYLNDAVLGILKLREKFDRVLYVDMDLHHGDGVEDAFSFTSKVMTVSLHKFSPGFFPGTGDVSDIGLGKGRYYSINVPLQDGIQDDKYYQICEGVLKEVFTTFNPEAVVLQLGADTIAGDPMCSFNMTPEGIGKCLKYVLQWQLPTLILGGGGYHLPNTARCWTYLTALIVGRTLSSEIPDHEFFTEYGPDYVLEITPSCRPDRNDTQKVQEILQSIKGNLKRVVEF

SEQ ID NO: 198 - protein, 134 aa, Artificial Sequence
  Description of Artificial Sequence: Synthetic polypeptide
ASSPKKKRKVEASMKEGENNKPREKSEGNKRKSSFSNSADDIKSKKKREQSNDIARGFERGLEPEKIIGATDSCGDLMFLMKWKDTDEADLVLAKEANVKCPQIVIAFYEERLTWHAYPEDAENKEKESAKSEF

SEQ ID NO: 199 - protein, 226 aa, Artificial Sequence
  Description of Artificial Sequence: Synthetic polypeptide
ASSPKKKRKVEASMEFWGIEVKSGKPVTVTPEEGILIHVSQASLGECKNKKGEFVPLHVKVGNQNLVLGTLSTENIPQLFCDLVFDKEFELSHTWGKGSVYFVGYKTPNIEPQGYSEEEEEEEEEVPAGNAAKAVAKPKAKPAEVKPAVDDEEDESDSDGMDEDDSDGEDSEEEEPTPKKPASSKKRANETTPKAPVSAKKAKVAVTPQKTDEKKKGGKAANQSEF

SEQ ID NO: 200 - protein, 108 aa, Artificial Sequence
  Description of Artificial Sequence: Synthetic polypeptide
ASSPKKKRKVEASMSRRKQAKPQHFQSDPEVASLPRRDGDTEKGQPSRPTKSKDAHVCGRCCAEFFELSDLLLHKKSCTKNQLVLIVNESPASPAKTFPPGPSLNDEF

SEQ ID NO: 201 - protein, 224 aa, Artificial Sequence
  Description of Artificial Sequence: Synthetic polypeptide
ASSPKKKRKVEASSCDSTNAAIAKQALKKPIKGKQAPRKKAQGKTQQNRKLTDFYPVRRSSRKSKAELQSEERKRIDELIESGKEEGMKIDLIDGKGRGVIATKQFSRGDFVVEYHGDLIEITDAKKREALYAQDPSTGCYMYYFQYLSKTYCVDATRETNRLGRLINHSKCGNCQTKLHDIDGVPHLILIASRDIAAGEELLYDYGDRSKASIEAFPWLKHEF

SEQ ID NO: 202 - protein, 337 aa, Artificial Sequence
  Description of Artificial Sequence: Synthetic polypeptide
ASSPKKKRKVEASRRVAYFYDADVGNYAYGAGHPMKPHRIRMAHSLIMNYGLYKKMEIYRAKPATKQEMCQFHTDEYIDFLSRVTPDNLEMFKRESVKFNVGDDCPVFDGLYEYCSISGGGSMEGAARLNRGKCDVAVNYAGGLHHAKKSEASGFCYLNDIVLGIIELLRYHPRVLYIDIDVHHGDGVEEAFYTTDRVMTCSFHKYGEFFPGTGELRDIGVGAGKNYAVNVPLRDGIDDATYRSVFEPVIKKIMEWYQPSAVVLQCGGDSLSGDRLGCFNLSMEGHANCVNYVKSFGIPMMVVGGGGYTMRNVARTWCFETGLLNNVVLDKDLPYEF

SEQ ID NO: 203 - protein, 257 aa, Artificial Sequence
  Description of Artificial Sequence: Synthetic polypeptide
ASSPKKKRKVEASMEKPRVLVLTGAGISAESGIRTFRAADGLWEEHRVEDVATPEGFDRDPELVQAFYNARRRQLQQPEIQPNAAHLALAKLQDALGDRFLLVTQNIDNLHERAGNTNVIHMHGELLKVRCSQSGQVLDWTGDVTPEDKCHCCQFPAPLRPHVVWFGEMPLGMDEIYMALSMADIFIAIGTSGHVYPAAGFVHEAKLHGAHTVELNLEPSQVGNEFAEKYYGPASQVVPEFVEKLLKGLKAGSIAEF

SEQ ID NO: 204 - protein, 349 aa, Artificial Sequence
  Description of Artificial Sequence: Synthetic polypeptide
ASSPKKKRKVEASNLKCVRILKQFHKDLERELLRRHHRSKTPRHLDPSLANYLVQKAKQRRALRRWEQELNAKRSHLGRITVENEVDLDGPPRAFVYINEYRVGEGITLNQVAVGCECQDCLWAPTGGCCPGASLHKFAYNDQGQVRLRAGLPIYECNSRCRCGYDCPNRVVQKGIRYDLCIFRTDDGRGWGVRTLEKIRKNSFVMEYVGEIITSEEAERRGQIYDRQGATYLFDLDYVEDVYTVDAAYYGNISHFVNHSCDPNLQVYNVFIDNLDERLPRIAFFATRTIRAGEELTFDYNMQVDPVDMESTRMDSNFGLAGLPGSPKKRVRIECKCGTESCRKYLFEF

SEQ ID NO: 205 - protein, 235 aa, Artificial Sequence
  Description of Artificial Sequence: Synthetic polypeptide
ASSPKKKRKVEASSNSWEEGSSGSSSDEEHGGGGMRVGPQYQAVVPDFDPAKLARRSQERDNLGMLVWSPNQNLSEAKLDEYIAIAKEKHGYNMEQALGMLFWHKHNIEKSLADLPNFTPFPDEWTVEDKVLFEQAFSFHGKTFHRIQQMLPDKSIASLVKFYYSWKKTRTKTSVMDRHARKQKREREESEDELEEANGNNPIDIEVDQNKESKKEVPPTETVPQVKKEKHSTEF

SEQ ID NO: 206 - protein, 343 aa, Artificial Sequence
  Description of Artificial Sequence: Synthetic polypeptide
ASSPKKKRKVEASYKESVHLETYPKERATEGIAMEIDYASCKRLGSSYRALPKSYQQPKCTGRTPLCKEVLNDTWVSFPSWSEDSTFVSSKKTQYEEHIYRCEDERFELDVVLETNLATIRVLEAIQKKLSRLSAEEQAKFRLDNTLGGTSEVIHRKALQRIYADKAADIIDGLRKNPSIAVPIVLKRLKMKEEEWREAQRGFNKVWREQNEKYYLKSLDHQGINFKQNDTKVLRSKSLLNEIESIYDERQEQATEENAGVPVGPHLSLAYEDKQILEDAAALIIHHVKRQTGIQKEDKYKIKQIMHHFIPDLLFAQRGDLSDVEEEEEEEMDVDEATGAVEF

SEQ ID NO: 207 - protein, 328 aa, Artificial Sequence
  Description of Artificial Sequence: Synthetic polypeptide
ASSPKKKRKVEASQSAYLHVSLARISDEDCCANCKGNCLSADFPCTCARETSGEYAYTKEGLLKEKFLDTCLKMKKEPDSFPKVYCKDCPLERDHDKGTYGKCDGHLIRKFIKECWRKCGCDMQCGNRVVQRGIRCQLQVYFTQEGKGWGLRTLQDLPKGTFICEYIGEILTNTELYDRNVRSSSERHTYPVTLDADWGSEKDLKDEEALCLDATICGNVARFINHRCEDANMIDIPIEIETPDRHYYHIAFFTLRDVKAMDELTWDYMIDFNDKSHPVKAFRCCCGSESCRDRKIKGSQGKSIERRKIVSAKKQQGSKEVSKKRKEF

SEQ ID NO: 208 - protein, 301 aa, Artificial Sequence
  Description of Artificial Sequence: Synthetic polypeptide
ASSPKKKRKVEASVQVKRVLEKSPGKLLVKMPFQASPGGKGEGGGATTSAQVMVIKRPGRKRKAEADPQAIPKKRGRKPGSVVAAAAAEAKKKAVKESSIRSVQETVLPIKKRKTRETVSIEVKEVVKPLLVSTLGEKSGKGLKTCKSPGRKSKESSPKGRSSSASSPPKKEHHHHHHHAESPKAPMPLLPPPPPPEPQSSEDPISPPEPQDLSSSICKEEKMPRAGSLESDGCPKEPAKTQPMVAAAATTTTTTTTTVAEKYKHRGEGERKDIVSSSMPRPNREEPVDSRTPVTERVSEF

SEQ ID NO: 209 - protein, 304 aa, Artificial Sequence
  Description of Artificial Sequence: Synthetic polypeptide
ASSPKKKRKVEASMAPKRQSAILPQPKKPRPAAAPKLEDKSASPGLPKGEKEQQEAIEHIDEVQNEIDRLNEQASEEILKVEQKYNKLRQPFFQKRSELIAKIPNFWVTTFVNHPQVSALLGEEDEEALHYLTRVEVTEFEDIKSGYRIDFYFDENPYFENKVLSKEFHLNESGDPSSKSTEIKWKSGKDLTKRSSQTQNKASRKRQHEEPESFFTWFTDHSDAGADELGEVIKDDIWPNPLQYYLVPDMDDEEGEAEDDDDDDEEEEGLEDIDEEGDEDEGEEDDDEDEGEEGEEDEGEDDEF

SEQ ID NO: 210 - protein, 303 aa, Artificial Sequence
  Description of Artificial Sequence: Synthetic polypeptide
ASSPKKKRKVEASMQLHEQIANISVTFNDIPRSDHSMTPTELCYFDDFATTLVVDSVLNFTTHKMSKKRRYLYQDEYRTARTVMKTFREQRDWTNAIYGLLTLRSVSHFLSKLPPNKLFEFRDHIVRFLNMFILDSGYTIQECKRYSQEGHQGAKLVSTGVWSRGDKIERLSGVVCLLSSEDEDSILAQEGSDFSVMYSTRKRCSTLWLGPGAYINHDCRPTCEFVSHGSTAHIRVLRDMVPGDEITCFYGSEFFGPNNIDCECCTCEKNMNGAFSYLRGNENAEPIISEKKTKYELRSRSEF

SEQ ID NO: 211 - DNA, 14164 bp, Artificial Sequence
  Description of Artificial Sequence: Synthetic polynucleotide
caactttgtatagaaaagttggctccgaattcgcccttcaggtccgaggttctagacgagtttactccctatcagtgatagagaacgatgtcgagtttactccctatcagtgatagagaacgtatgtcgagtttactccctatcagtgatagagaacgtatgtcgagtttactccctatcagtgatagagaacgtatgtcgagtttatccctatcagtgatagagaacgtatgtcgagtttactccctatcagtgatagagaacgtatgtcgaggtaggcgtgtacggtgggaggcctatataagcagagctcgtttagtgaaccgtcagatcgcaaagggcgaattcgacccaagtttgtacagccaccatggactataaggaccacgacggagactacaaggatcatgatattgattacaaagacgatgacgataagatggccccaaagaagaagcggaaggtcggtatccacggagtcccagcagccgacaagaagtacagcatcggcctggacatcggcaccaactctgtgggctgggccgtgatcaccgacgagtacaaggtgcccagcaagaaattcaaggtgctgggcaacaccgaccggcacagcatcaagaagaacctgatcggagccctgctgttcgacagcggcgaaacagccgaggccacccggctgaagagaaccgccagaagaagatacaccagacggaagaaccggatctgctatctgcaagagatcttcagcaacgagatggccaaggtggacgacagcttcttccacagactggaagagtccttcctggtggaagaggataagaagcacgagcggcaccccatcttcggcaacatcgtggacgaggtggcctaccacgagaagtaccccaccatctaccacctgagaaagaaactggtggacagcaccgacaaggccgacctgcggctgatctatctggccctggcccacatgatcaagttccggggccacttcctgatcgagggcgacctgaaccccgacaacagcgacgtggacaagctgttcatccagctggtgcagacctacaaccagctgttcgaggaaaaccccatcaacgccagcggcgtggacgccaaggccatcctgtctgccagactgagcaagagcagacggctggaaaatctgatcgcccagctgcccggcgagaagaagaatggcctgttcggcaacctgattgccctgagcctgggcctgacccccaacttcaagagcaacttcgacctggccgaggatgccaaactgcagctgagcaaggacacctacgacgacgacctggacaacctgctggcccagatcggcgaccagtacgccgacctgtttctggccgccaagaacctgtccgacgccatcctgctgagcgacatcctgagagtgaacaccgagatcaccaaggcccccctgagcgcctctatgatcaagagatacgacgagcaccaccaggacctgaccctgctgaaagctctcgtgcggcagcagctgcctgagaagtacaaagagattttcttcgaccagagcaagaacggctacgccggctacattgacggcggagccagccaggaagagttctacaagttcatcaagcccatcctggaaaagatggacggcaccgaggaactgctcgtgaagctgaacagagaggacctgctgcggaagcagcggaccttcgacaacggcagcatcccccaccagatccacctgggagagctgcacgccattctgcggcggcaggaagatttttacccattcctgaaggacaaccgggaaaagatcgagaagatcctgaccttccgcatcccctactacgtgggccctctggccaggggaaacagcagattcgcctggatgaccagaaagagcgaggaaaccatcaccccctggaacttcgaggaagtggtggacaagggcgcttccgcccagagcttcatcgagcggatgaccaacttcgataagaacctgcccaacgagaaggtgctgcccaagcacagcctgctgtacgagtacttcaccgtgtataacgagctgaccaaagtgaaatacgtgaccgagggaatgagaaagcccgccttcctgagcggcgagcagaaaaaggccatcgtggacctgctgttcaagaccaaccggaaagtgaccgtgaagcagctgaaagaggactacttcaagaaaatcgagtgcttcgactccgtggaaatctccggcgtggaagatcggttcaacgcctccctgggcacataccacgatctgctgaaaattatcaaggacaaggacttcctggacaatgaggaaaacgaggacattctggaagatatcgtgctgaccctgacactgtttgaggacagagagatgatcgaggaacggctgaaaacctatgcccacctgttcgacgacaaagtgatgaagcagctgaagcggcggagatacaccggctggggcaggctgagccggaagctgatcaacggcatccgggacaagcagtccggcaagacaatcctggatttcctgaagtccgacggcttcgccaacagaaacttcatgcagctgatccacgacgacagcctgacctttaaagaggacatccagaaagcccaggtgtccggccagggcgatagcctgcacgagcacattgccaatctggccggcagccccgccattaagaagggcatcctgcagacagtgaaggtggtggacgagctcgtgaaagtgatgggccggcacaagcccgagaacatcgtgatcgaaatggccagagagaaccagaccacccagaagggacagaagaacagccgcgagagaatgaagcggatcgaagagggcatcaaagagctgggcagccagatcctgaaagaacaccccgtggaaaacacccagctgcagaacgagaagctgtacctgtactacctgcagaatgggcgggatatgtacgtggaccaggaactggacatcaaccggctgtccgactacgatgtggaccatatcgtgcctcagagctttctgaaggacgactccatcgacaacaaggtgctgaccagaagcgacaagaaccggggcaagagcgacaacgtgccctccgaagaggtcgtgaagaagatgaagaactactggcggcagctgctgaacgccaagctgattacccagagaaagttcgacaatctgaccaaggccgagagaggcggcctgagcgaactggataaggccggcttcatcaagagacagctggtggaaacccggcagatcacaaagcacgtggcacagatcctggactcccggatgaacactaagtacgacgagaatgacaagctgatccgggaagtgaaagtgatcaccctgaagtccaagctggtgtccgatttccggaaggatttccagttttacaaagtgcgcgagatcaacaactaccaccacgcccacgacgcctacctgaacgccgtcgtgggaaccgccctgatcaaaaagtaccctaagctggaaagcgagttcgtgtacggcgactacaaggtgtacgacgtgcggaagatgatcgccaagagcgagcaggaaatcggcaaggctaccgccaagtacttcttctacagcaacatcatgaactttttcaagaccgagattaccctggccaacggcgagatccggaagcggcctctgatcgagacaaacggcgaaaccggggagatcgtgtgggataagggccgggattttgccaccgtgcggaaagtgctgagcatgccccaagtgaatatcgtgaaaaagaccgaggtgcagacaggcggcttcagcaaagagtctatcctgcccaagaggaacagcgataagctgatcgccagaaagaaggactgggaccctaagaagtacggcggcttcgacagccccaccgtggcctattctgtgctggtggtggccaaagtggaaaagggcaagtccaagaaactgaagagtgtgaaagagctgctggggatcaccatcatggaaagaagcagcttcgagaagaatcccatcgactttctggaagccaagggctacaaagaagtgaaaaaggacctgatcatcaagctgcctaagtactccctgttcgagctggaaaacggccggaagagaatgctggcctctgccggcgaactgcagaagggaaacgaactggccctgccctccaaatatgtgaacttcctgtacctggccagccactatgagaagctgaagggctcccccgaggataatgagcagaaacagctgtttgtggaacagcacaagcactacctggacgagatcatcgagcagatcagcgagttctccaagagagtgatcctggccgacgctaatctggacaaagtgctgtccgcctacaacaagcaccgggataagcccatcagagagcaggccgagaatatcatccacctgtttaccctgaccaatctgggagcccctgccgccttcaagtactttgacaccaccatcgaccggaagaggtacaccagcaccaaagaggtgctggacgccaccctgatccaccagagcatcaccggcctgtacgagacacggatcgacctgtctcagctgggaggcgacaaaaggccggcggccacgaaaaaggccggccaggcaaaaaagaaaaaggaattctctagaggcagtggagagggcagaggaagtctgctaacatgcggtgacgtcgaggagaatcctggcccagtgagcaagggcgaggagctgttcaccggggtggtgcccatcctggtcgagctggacggcgacgtaaacggccacaagttcagcgtgtccggcgagggcgagggcgatgccacctacggcaagctgaccctgaagttcatctgcaccaccggcaagctgcccgtgccctggcccaccctcgtgaccaccctgacctacggcgtgcagtgcttcagccgctaccccgaccacatgaagcagcacgacttcttcaagtccgccatgcccgaaggctacgtccaggagcgcaccatcttcttcaaggacgacggcaactacaagacccgcgccgaggtgaagttcgagggcgacaccctggtgaaccgcatcgagctgaagggcatcgacttcaaggaggacggcaacatcctggggcacaagctggagtacaactacaacagccacaacgtctatatcatggccgacaagcagaagaacggcatcaaggtgaacttcaagatccgccacaacatcgaggacggcagcgtgcagctcgccgaccactaccagcagaacacccccatcggcgacggccccgtgctgctgcccgacaaccactacctgagcacccagtccgccctgagcaaagaccccaacgagaagcgcgatcacatggtcctgctggagttcgtgaccgccgccgggatcactctcggcatggacgagctgtacaagctcgagggaagcggagctactaacttcagcctgctgaagcaggctggcgacgtggaggagaaccctggacctatgtctaggctggacaagagcaaagtcataaacggagctctggaattactcaatggtgtcggtatcgaaggcctgacgacaaggaaactcgctcaaaagctgggagttgagcagcctaccctgtactggcacgtgaagaacaagcgggccctgctcgatgccctgccaatcgagatgctggacaggcatcatacccacttctgccccctggaaggcgagtcatggcaagactttctgcggaacaacgccaagtcataccgctgtgctctcctctcacatcgcgacggggctaaagtgcatctcggcacccgcccaacagagaaacagtacgaaaccctggaaaatcagctcgcgttcctgtgtcagcaaggcttctccctggagaacgcactgtacgctctgtccgccgtgggccactttacactgggctgcgtattggaggaacaggagcatcaagtagcaaaagaggaaagagagacacctaccaccgattctatgcccccacttctgagacaagcaattgagctgttcgaccggcagggagccgaacctgccttccttttcggcctggaactaatcatatgtggcctggagaaacagctaaagtgcgaaagcggcgggccgaccgacgcccttgacgattttgacttagacatgctcccagccgatgcccttgacgattttgaccttgacatgctccccgggtaatgtacaaagtggtgaattccggcaattcgatatcaagcttatcgataatcaacctctggattacaaaatttgtgaaagattgactggtattcttaactatgttgctccttttacgctatgtggatacgctgctttaatgcctttgtatcatgctattgcttcccgtatggctttcattttctcctccttgtataaatcctggttgctgtctctttatgaggagttgtggcccgttgtcaggcaacgtggcgtggtgtgcactgtgtttgctgacgcaacccccactggttggggcattgccaccacctgtcagctcctttccgggactttcgctttccccctccctattgccacggcggaactcatcgccgcctgccttgcccgctgctggacaggggctcggctgttgggcactgacaattccgtggtgttgtcggggaaatcatcgtcctttccttggctgctcgcctgtgttgccacctggattctgcgcgggacgtccttctgctacgtcccttcggccctcaatccagcggaccttccttcccgcggcctgctgccggctctgcggcctcttccgcgtcttcgccttcgccctcagacgagtcggatctccctttgggccgcctccccgcatcgataccgtcgacctcgagacctagaaaaacatggagcaatcacaagtagcaatacagcagctaccaatgctgattgtgcctggctagaagcacaagaggaggaggaggtgggttttccagtcacacctcaggtacctttaagaccaatgacttacaaggcagctgtagatcttagccactttttaaaagaaaaggggggactggaagggctaattcactcccaacgaagacaagatatccttgatctgtggatctaccacacacaaggctacttccctgattggcagaactacacaccagggccagggatcagatatccactgacctttggatggtgctacaagctagtaccagttgagcaagagaaggtagaagaagccaatgaaggagagaacacccgcttgttacaccctgtgagcctgcatgggatggatgacccggagagagaagtattagagtggaggtttgacagccgcctagcatttcatcacatggcccgagagctgcatccggactgtactgggtctctctggttagaccagatctgagcctgggagctctctggctaactagggaacccactgcttaagcctcaataaagcttgccttgagtgcttcaagtagtgtgtgcccgtctgttgtgtgactctggtaactagagatccctcagacccttttagtcagtgtggaaaatctctagcagggcccgtttaaacccgctgatcagcctcgactgtgccttctagttgccagccatctgttgtttgcccctcccccgtgccttccttgaccctggaaggtgccactcccactgtcctttcctaataaaatgaggaaattgcatcgcattgtctgagtaggtgtcattctattctggggggtggggtggggcaggacagcaagggggaggattgggaagacaatagcaggcatgctggggatgcggtgggctctatggcttctgaggcggaaagaaccagctggggctctagggggtatccccacgcgccctgtagcggcgcattaagcgcggcgggtgtggtggttacgcgcagcgtgaccgctacacttgccagcgccctagcgcccgctcctttcgctttcttcccttcctttctcgccacgttcgccggctttccccgtcaagctctaaatcgggggctccctttagggttccgatttagtgctttacggcacctcgaccccaaaaaacttgattagggtgatggttcacgtagtgggccatcgccctgatagacggtttttcgccctttgacgttggagtccacgttctttaatagtggactcttgttccaaactggaacaacactcaaccctatctcggtctattcttttgatttataagggattttgccgatttcggcctattggttaaaaaatgagctgatttaacaaaaatttaacgcgaattaattctgtggaatgtgtgtcagttagggtgtggaaagtccccaggctccccagcaggcagaagtatgcaaagcatgcatctcaattagtcagcaaccaggtgtggaaagtccccaggctccccagcaggcagaagtatgcaaagcatgcatctcaattagtcagcaaccatagtcccgcccctaactccgcccatcccgcccctaactccgcccagttccgcccattctccgccccatggctgactaattttttttatttatgcagaggccgaggccgcctctgcctctgagctattccagaagtagtgaggaggcttttttggaggcctaggcttttgcaaaaagctcccgggagcttgtatatccattttcggatctgatcagcacgtgttgacaattaatcatcggcatagtatatcggcatagtataatacgacaaggtgaggaactaaaccatggccaagttgaccagtgccgttccggtgctcaccgcgcgcgacgtcgccggagcggtcgagttctggaccgaccggctcgggttctcccgggacttcgtggaggacgacttcgccggtgtggtccgggacgacgtgaccctgttcatcagcgcggtccaggaccaggtggtgccggacaacaccctggcctgggtgtgggtgcgcggcctggacgagctgtacgccgagtggtcggaggtcgtgtccacgaacttccgggacgcctccgggccggccatgaccgagatcggcgagcagccgtgggggcgggagttcgccctgcgcgacccggccggcaactgcgtgcacttcgtggccgaggagcaggactgacacgtgctacgagatttcgattccaccgccgccttctatgaaaggttgggcttcggaatcgttttccgggacgccggctggatgatcctccagcgcggggatctcatgctggagttcttcgcccaccccaacttgtttattgcagcttataatggttacaaataaagcaatagcatcacaaatttcacaaataaagcatttttttcactgcattctagttgtggtttgtccaaactcatcaatgtatcttatcatgtctgtataccgtcgacctctagctagagcttggcgtaatcatggtcatagctgtttcctgtgtgaaattgttatccgctcacaattccacacaacatacgagccggaagcataaagtgtaaagcctggggtgcctaatgagtgagctaactcacattaattgcgttgcgctcactgcccgctttccagtcgggaaacctgtcgtgccagctgcattaatgaatcggccaacgcgcggggagaggcggtttgcgtattgggcgctcttccgcttcctcgctcactgactcgctgcgctcggtcgttcggctgcggcgagcggtatcagctcactcaaaggcggtaatacggttatccacagaatcaggggataacgcaggaaagaacatgtgagcaaaaggccagcaaaaggccaggaaccgtaaaaaggccgcgttgctggcgtttttccataggctccgcccccctgacgagcatcacaaaaatcgacgctcaagtcagaggtggcgaaacccgacaggactataaagataccaggcgtttccccctggaagctccctcgtgcgctctcctgttccgaccctgccgcttaccggatacctgtccgcctttctcccttcgggaagcgtggcgctttctcatagctcacgctgtaggtatctcagttcggtgtaggtcgttcgctccaagctgggctgtgtgcacgaaccccccgttcagcccgaccgctgcgccttatccggtaactatcgtcttgagtccaacccggtaagacacgacttatcgccactggcagcagccactggtaacaggattagcagagcgaggtatgtaggcggtgctacagagttcttgaagtggtggcctaactacggctacactagaagaacagtatttggtatctgcgctctgctgaagccagttaccttcggaaaaagagttggtagctcttgatccggcaaacaaaccaccgctggtagcggtggtttttttgtttgcaagcagcagattacgcgcagaaaaaaaggatctcaagaagatcctttgatcttttctacggggtctgacgctcagtggaacgaaaactcacgttaagggattttggtcatgagattatcaaaaaggatcttcacctagatccttttaaattaaaaatgaagttttaaatcaatctaaagtatatatgagtaaacttggtctgacagttaccaatgcttaatcagtgaggcacctatctcagcgatctgtctatttcgttcatccatagttgcctgactccccgtcgtgtagataactacgatacgggagggcttaccatctggccccagtgctgcaatgataccgcgagacccacgctcaccggctccagatttatcagcaataaaccagccagccggaagggccgagcgcagaagtggtcctgcaactttatccgcctccatccagtctattaattgttgccgggaagctagagtaagtagttcgccagttaatagtttgcgcaacgttgttgccattgctacaggcatcgtggtgtcacgctcgtcgtttggtatggcttcattcagctccggttcccaacgatcaaggcgagttacatgatcccccatgttgtgcaaaaaagcggttagctccttcggtcctccgatcgttgtcagaagtaagttggccgcagtgttatcactcatggttatggcagcactgcataattctcttactgtcatgccatccgtaagatgcttttctgtgactggtgagtactcaaccaagtcattctgagaatagtgtatgcggcgaccgagttgctcttgcccggcgtcaatacgggataataccgcgccacatagcagaactttaaaagtgctcatcattggaaaacgttcttcggggcgaaaactctcaaggatcttaccgctgttgagatccagttcgatgtaacccactcgtgcacccaactgatcttcagcatcttttactttcaccagcgtttctgggtgagcaaaaacaggaaggcaaaatgccgcaaaaaagggaataagggcgacacggaaatgttgaatactcatactcttcctttttcaatattattgaagcatttatcagggttattgtctcatgagcggatacatatttgaatgtatttagaaaaataaacaaataggggttccgcgcacatttccccgaaaagtgccacctgacgtcgacggatcgggagatctcccgatcccctatggtgcactctcagtacaatctgctctgatgccgcatagttaagccagtatctgctccctgcttgtgtgttggaggtcgctgagtagtgcgcgagcaaaatttaagctacaacaaggcaaggcttgaccgacaattgcatgaagaatctgcttagggttaggcgttttgcgctgcttcgcgatgtacgggccagatatacgcgttgacattgattattgactagttattaatagtaatcaattacggggtcattagttcatagcccatatatggagttccgcgttacataacttacggtaaatggcccgcctggctgaccgcccaacgacccccgcccattgacgtcaataatgacgtatgttcccatagtaacgccaatagggactttccattgacgtcaatgggtggagtatttacggtaaactgcccacttggcagtacatcaagtgtatcatatgccaagtacgccccctattgacgtcaatgacggtaaatggcccgcctggcattatgcccagtacatgaccttatgggactttcctacttggcagtacatctacgtattagtcatcgctattaccatggtgatgcggttttggcagtacatcaatgggcgtggatagcggtttgactcacggggatttccaagtctccaccccattgacgtcaatgggagtttgttttggcaccaaaatcaacgggactttccaaaatgtcgtaacaactccgccccattgacgcaaatgggcggtaggcgtgtacggtgggaggtctatataagcagcgcgttttgcctgtactgggtctctctggttagaccagatctgagcctgggagctctctggctaactagggaacccactgcttaagcctcaataaagcttgccttgagtgcttcaagtagtgtgtgcccgtctgttgtgtgactctggtaactagagatccctcagacccttttagtcagtgtggaaaatctctagcagtggcgcccgaacagggacttgaaagcgaaagggaaaccagaggagctctctcgacgcaggactcggcttgctgaagcgcgcacggcaagaggcgaggggcggcgactggtgagtacgccaaaaattttgactagcggaggctagaaggagagagatgggtgcgagagcgtcagtattaagcgggggagaattagatcgcgatgggaaaaaattcggttaaggccagggggaaagaaaaaatataaattaaaacatatagtatgggcaagcagggagctagaacgattcgcagttaatcctggcctgttagaaacatcagaaggctgtagacaaatactgggacagctacaaccatcccttcagacaggatcagaagaacttagatcattatataatacagtagcaaccctctattgtgtgcatcaaaggatagagataaaagacaccaaggaagctttagacaagatagaggaagagcaaaacaaaagtaagaccaccgcacagcaagcggccgctgatcttcagacctggaggaggagatatgagggacaattggagaagtgaattatataaatataaagtagtaaaaattgaaccattaggagtagcacccaccaaggcaaagagaagagtggtgcagagagaaaaaagagcagtgggaataggagctttgttccttgggttcttgggagcagcaggaagcactatgggcgcagcgtcaatgacgctgacggtacaggccagacaattattgtctggtatagtgcagcagcagaacaatttgctgagggctattgaggcgcaacagcatctgttgcaactcacagtctggggcatcaagcagctccaggcaagaatcctggctgtggaaagatacctaaaggatcaacagctcctggggatttggggttgctctggaaaactcatttgcaccactgctgtgccttggaatgctagttggagtaataaatctctggaacagatttggaatcacacgacctggatggagtgggacagagaaattaacaattacacaagcttaatacactccttaattgaagaatcgcaaaaccagcaagaaaagaatgaacaagaattattggaattagataaatgggcaagtttgtggaattggtttaacataacaaattggctgtggtatataaaattattcataatgatagtaggaggcttggtaggtttaagaatagtttttgctgtactttctatagtgaatagagttaggcagggatattcaccattatcgtttcagacccacctcccaaccccgaggggacccgacaggcccgaaggaatagaagaagaaggtggagagagagacagagacagatccattcgattagtgaacggatcggcactgcgtgcgccaattctgcagacaaatggcagtattcatccacaattttaaaagaaaaggggggattggggggtacagtgcaggggaaagaatagtagacataatagcaacagacatacaaactaaagaattacaaaaacaaattacaaaaattcaaaattttcgggtttattacagggacagcagagatccagtttggttaattaa

SEQ ID NO: 212 - DNA, 14 bp, Artificial Sequence
  Description of Artificial Sequence: Synthetic oligonucleotide
tttattccctgacc

SEQ ID NO: 213 - protein, 34 aa, Artificial Sequence
  Description of Artificial Sequence: Synthetic polypeptide
LTPEQVVAIASNGGGKQALETVQRLLPVLCQAHG

SEQ ID NO: 214 - protein, 32 aa, Artificial Sequence
  Description of Artificial Sequence: Synthetic polypeptide
LTPDQVVAIASGGKQALETVQRLLPVLCQDHG

SEQ ID NO: 215 - protein, 32 aa, Artificial Sequence
  Description of Artificial Sequence: Synthetic polypeptide
LTPEQVVAIASGGKQALETVQRLLPVLCQAHG

SEQ ID NO: 216 - protein, 32 aa, Artificial Sequence
  Description of Artificial Sequence: Synthetic polypeptide
LTPDQVVAIASGGKQALETVQRLLPVLCQAHG

SEQ ID NO: 217 - protein, 32 aa, Artificial Sequence
  Description of Artificial Sequence: Synthetic polypeptide
LTPAQVVAIASGGKQALETVQRLLPVLCQAHG

SEQ ID NO: 218 - protein, 32 aa, Artificial Sequence
  Description of Artificial Sequence: Synthetic polypeptide
LTPAQVVAIASGGKQALETVQRLLPVLCQDHG

SEQ ID NO: 219 - protein, 32 aa, Artificial Sequence
  Description of Artificial Sequence: Synthetic polypeptide
LTPDQVVAIASGGKQALETVQRLLPVLCEQHG

SEQ ID NO: 220 - protein, 32 aa, Artificial Sequence
  Description of Artificial Sequence: Synthetic polypeptide
LTPDQVVAIANGGKQALETVQRLLPVLCQDHG

SEQ ID NO: 221 - protein, 32 aa, Artificial Sequence
  Description of Artificial Sequence: Synthetic polypeptide
LTLDQVVAIASGGKQALETVQRLLPVLCQDHG

SEQ ID NO: 222 - protein, 32 aa, Artificial Sequence
  Description of Artificial Sequence: Synthetic polypeptide
LTPQQVVAIASGGKQALETVQRLLPVLCQAHG

SEQ ID NO: 223 - protein, 32 aa, Artificial Sequence
  Description of Artificial Sequence: Synthetic polypeptide
LTPDQVVAIANGGKQALETVQRLLPVLCQAHG

SEQ ID NO: 224 - protein, 32 aa, Artificial Sequence
  Description of Artificial Sequence: Synthetic polypeptide
LTPNQVVAIASGGKQALETVQRLLPVLCQDHG

SEQ ID NO: 225 - protein, 32 aa, Artificial Sequence
  Description of Artificial Sequence: Synthetic polypeptide
LTLDQVVAIASGGKQALETVQRLLPVLCQAHG

SEQ ID NO: 226 - protein, 32 aa, Artificial Sequence
  Description of Artificial Sequence: Synthetic polypeptide
LTPAQVVAIANGGKQALETVQRLLPVLCQDHG

SEQ ID NO: 227 - protein, 32 aa, Artificial Sequence
  Description of Artificial Sequence: Synthetic polypeptide
LTPEQVVAIASGGKQALETVQALLPVLCQAHG

SEQ ID NO: 228 - protein, 32 aa, Artificial Sequence
  Description of Artificial Sequence: Synthetic polypeptide
LTLDQVVAIASGSKQALETVQRLLPVLCQDHG

SEQ ID NO: 229 - protein, 32 aa, Artificial Sequence
  Description of Artificial Sequence: Synthetic polypeptide
LTQDQVVAIASGGKQALETVQRLLPVLCQDHG

SEQ ID NO: 230 - protein, 32 aa, Artificial Sequence
  Description of Artificial Sequence: Synthetic polypeptide
LSPDQVVAIASGGKQALETVQRLLPVLCQDHG

SEQ ID NO: 231 - protein, 32 aa, Artificial Sequence
  Description of Artificial Sequence: Synthetic polypeptide
LTPDQVVAIANGGKQALETLQRLLPVLCQDHG

SEQ ID NO: 232 - protein, 32 aa, Artificial Sequence
  Description of Artificial Sequence: Synthetic polypeptide
LTPDQVVAIASGGKQALETLQRLLPVLCQDHG

SEQ ID NO: 233 - protein, 32 aa, Artificial Sequence
  Description of Artificial Sequence: Synthetic polypeptide
LTPDQVVAIASGGKQALETVQRLLPVLRQAHG

SEQ ID NO: 234 - protein, 32 aa, Artificial Sequence
  Description of Artificial Sequence: Synthetic polypeptide
LTPDQVVAIASGGNQALETVQRLLPVLCQAHG

SEQ ID NO: 235 - protein, 32 aa, Artificial Sequence
  Description of Artificial Sequence: Synthetic polypeptide
LTPDQVVAIASGGKQALATVQRLLPVLCQAHG

SEQ ID NO: 236 - protein, 32 aa, Artificial Sequence
  Description of Artificial Sequence: Synthetic polypeptide
LTPAQVVAIANGGKQALETVQRLLPVLCQAHG

SEQ ID NO: 237 - protein, 32 aa, Artificial Sequence
  Description of Artificial Sequence: Synthetic polypeptide
LTLAQVVAIASGGKQALETVQRLLPVLCQAHG

SEQ ID NO: 238 - protein, 32 aa, Artificial Sequence
  Description of Artificial Sequence: Synthetic polypeptide
LTPEQVVAIACGGKQALETVQRLLPVLCQAHG

SEQ ID NO: 239 - protein, 32 aa, Artificial Sequence
  Description of Artificial Sequence: Synthetic polypeptide
LTPAQVVAIASGGKQALETVQQLLPVLCEQHG

SEQ ID NO: 240 - protein, 32 aa, Artificial Sequence
  Description of Artificial Sequence: Synthetic polypeptide
LTPQQVVAIASGGRPALETVQRLLPVLCQAHG

SEQ ID NO: 241 - protein, 32 aa, Artificial Sequence
  Description of Artificial Sequence: Synthetic polypeptide
LTPDQVVAIASGSKQALETVQRLLPVLCQDHG

SEQ ID NO: 242 - protein, 32 aa, Artificial Sequence
  Description of Artificial Sequence: Synthetic polypeptide
LTPNQVVAIASGGKQALETVQRLLPVLCQAHG

SEQ ID NO: 243 - protein, 32 aa, Artificial Sequence
  Description of Artificial Sequence: Synthetic polypeptide
LTPDQVVAIASGGKQALGTVQRLLPVLCQDHG

SEQ ID NO: 244 - protein, 32 aa, Artificial Sequence
  Description of Artificial Sequence: Synthetic polypeptide
LTLAQVVAIASGGKQALETVQRLLPVLCQDHG

SEQ ID NO: 245 - protein, 32 aa, Artificial Sequence
  Description of Artificial Sequence: Synthetic polypeptide
LTPAQAVAIASGGKQALETVQRLLPVLCQDHG

SEQ ID NO: 246 - protein, 32 aa, Artificial Sequence
  Description of Artificial Sequence: Synthetic polypeptide
LTPAQVVAIASGGNQALETVQRLLPVLCQDHG

SEQ ID NO: 247 - protein, 32 aa, Artificial Sequence
  Description of Artificial Sequence: Synthetic polypeptide
LTPDQVVAIASGGKQALETLQRLLPVLCQAHG

SEQ ID NO: 248 - protein, 32 aa, Artificial Sequence
  Description of Artificial Sequence: Synthetic polypeptide
LTPDQVVAIANGGKQALETLQRLLPVLCQAHG

SEQ ID NO: 249 - protein, 32 aa, Artificial Sequence
  Description of Artificial Sequence: Synthetic polypeptide
LTPDQVVTIASGGKQALETVQRLLPVLCQDHG

SEQ ID NO: 250 - protein, 32 aa, Artificial Sequence
  Description of Artificial Sequence: Synthetic polypeptide
LTPAQVVAIANGGKQALETVRRLLPVLCQDHG

SEQ ID NO: 251 - protein, 32 aa, Artificial Sequence
  Description of Artificial Sequence: Synthetic polypeptide
LTPDQVVAIASGGNQALETVQRLLPVLCQDHG

SEQ ID NO: 252 - protein, 32 aa, Artificial Sequence
  Description of Artificial Sequence: Synthetic polypeptide
LTPDQVVAIASGGKQALETVQRLLPVLCQTHG

SEQ ID NO: 253 - protein, 32 aa, Artificial Sequence
  Description of Artificial Sequence: Synthetic polypeptide
LPPDQVVAIASGGKQALETVQRLLPVLCQDHG

SEQ ID NO: 254 - protein, 32 aa, Artificial Sequence
  Description of Artificial Sequence: Synthetic polypeptide
LTSDQVVAIASGGKQALETVQRLLPVLCQDHG

SEQ ID NO: 255 - protein, 32 aa, Artificial Sequence
  Description of Artificial Sequence: Synthetic polypeptide
LTPAQVVAIASGGKQALETVQRLLPVLCEQHG

SEQ ID NO: 256 - protein, 32 aa, Artificial Sequence
  Description of Artificial Sequence: Synthetic polypeptide
LIPAQVVAIASGGKQALETVQRLLPVLCQDHG

SEQ ID NO: 257 - protein, 32 aa, Artificial Sequence
  Description of Artificial Sequence: Synthetic polypeptide
LTPAQVVAIASGGKQALETMQRLLPVLCQAHG

SEQ ID NO: 258 - protein, 32 aa, Artificial Sequence
  Description of Artificial Sequence: Synthetic polypeptide
LTRDQVVAIASGGKQALETVQRLLPVLCQDHG

SEQ ID NO: 259 - protein, 32 aa, Artificial Sequence
  Description of Artificial Sequence: Synthetic polypeptide
LTPDQVVATASGGKQALETVQRLLPVLCQDHG

SEQ ID NO: 260 - protein, 32 aa, Artificial Sequence
  Description of Artificial Sequence: Synthetic polypeptide
LIPDQVVAIANGGKQALETVQRLLPVLCQAHG

SEQ ID NO: 261 - protein, 32 aa, Artificial Sequence
  Description of Artificial Sequence: Synthetic polypeptide
LTPDQVVAIASGGKQALETVQRLLPVLCQNHG

SEQ ID NO: 262 - protein, 32 aa, Artificial Sequence
  Description of Artificial Sequence: Synthetic polypeptide
LTLDQVVAIASGGKKALETVQRLLPVLCQDHG

SEQ ID NO: 263 - protein, 32 aa, Artificial Sequence
  Description of Artificial Sequence: Synthetic polypeptide
LTPDQLVAIANGGKQALETVQRLLPVLCQDHG

SEQ ID NO: 264 - protein, 32 aa, Artificial Sequence
  Description of Artificial Sequence: Synthetic polypeptide
LTPDQVVAIASGGKQALETVQRLLPVLCQGHG

SEQ ID NO: 265 - protein, 32 aa, Artificial Sequence
  Description of Artificial Sequence: Synthetic polypeptide
LTPDQVVAIASGGKQALETVQRLLPVLCQEHG

SEQ ID NO: 266 - protein, 32 aa, Artificial Sequence
  Description of Artificial Sequence: Synthetic polypeptide
LTLDKVVAIASGGKQALETVQRLLPVLCQDHG

SEQ ID NO: 267 - protein, 32 aa, Artificial Sequence
  Description of Artificial Sequence: Synthetic polypeptide
LTPAQVVAIASGSKQALETVQRLLPVLCQAHG

SEQ ID NO: 268 - protein, 32 aa, Artificial Sequence
  Description of Artificial Sequence: Synthetic polypeptide
LTPDKVVAIASGGKQALETVQRLLPVLCQAHG

SEQ ID NO: 269 - protein, 32 aa, Artificial Sequence
  Description of Artificial Sequence: Synthetic polypeptide
LTQDQVVAIASGGKQALETVQRLLPVLYQDHG

SEQ ID NO: 270 - protein, 32 aa, Artificial Sequence
  Description of Artificial Sequence: Synthetic polypeptide
LTPAQVVAIVSGGKQALETVQRLLPVLCQAHG

SEQ ID NO: 271 - protein, 32 aa, Artificial Sequence
  Description of Artificial Sequence: Synthetic polypeptide
LTPDKVVAIANGGKQALETVQRLLPVLCQDHG

SEQ ID NO: 272 - protein, 32 aa, Artificial Sequence
  Description of Artificial Sequence: Synthetic polypeptide
LTQDQVVAIASGGKQALETVQRLLPVLCQAHG

SEQ ID NO: 273 - protein, 32 aa, Artificial Sequence
  Description of Artificial Sequence: Synthetic polypeptide
LTPDQVMAIANGGKQALETVQRLLPVLCQDHG

SEQ ID NO: 274 - protein, 32 aa, Artificial Sequence
  Description of Artificial Sequence: Synthetic polypeptide
LTTDQVVAIASGGKQALETVQRLLPVLCQAHG

SEQ ID NO: 275 - protein, 32 aa, Artificial Sequence
  Description of Artificial Sequence: Synthetic polypeptide
LTPDQVVAIASGSKQALETVQRLLPVLCQAHG

SEQ ID NO: 276 - protein, 32 aa, Artificial Sequence
  Description of Artificial Sequence: Synthetic polypeptide
LTPDQVVAIANGGKQALETVQRLLLVLCQAHG

SEQ ID NO: 277 - protein, 32 aa, Artificial Sequence
  Description of Artificial Sequence: Synthetic polypeptide
LTQEQVVAIASGGKQALETVQRLLPVLCQAHG

SEQ ID NO: 278 - protein, 32 aa, Artificial Sequence
  Description of Artificial Sequence: Synthetic polypeptide
LTPDQVVTIANGGKQALETVQRLLPVLCQAHG

SEQ ID NO: 279 - protein, 32 aa, Artificial Sequence
  Description of Artificial Sequence: Synthetic polypeptide
LSPAQVVAIASGGKQALETVQRLLPVLCHDHG

SEQ ID NO: 280 - protein, 32 aa, Artificial Sequence
  Description of Artificial Sequence: Synthetic polypeptide
LTPDQVVAIASGGKQALEMVQRLLPVLCQAHG

SEQ ID NO: 281 - protein, 32 aa, Artificial Sequence
  Description of Artificial Sequence: Synthetic polypeptide
LIPDQVVAIASGGKQALETVQRLLPVLCQDHG

SEQ ID NO: 282 - protein, 32 aa, Artificial Sequence
  Description of Artificial Sequence: Synthetic polypeptide
LTPVQVVAIASGGKQALETVQRLLPVLCQDHG

SEQ ID NO: 283 - protein, 32 aa, Artificial Sequence
  Description of Artificial Sequence: Synthetic polypeptide
LTPDQVVAIASGGKQALKTVQRLLPVLCQDHG

SEQ ID NO: 284 - protein, 32 aa, Artificial Sequence
  Description of Artificial Sequence: Synthetic polypeptide
LTPDQVVAIASGGKQALETMQRLLPVLCQAHG

SEQ ID NO: 285 - protein, 32 aa, Artificial Sequence
  Description of Artificial Sequence: Synthetic polypeptide
LTPAQVVAIASGGKQALETVQRLFPVLCQDHG

SEQ ID NO: 286 - protein, 32 aa, Artificial Sequence
  Description of Artificial Sequence: Synthetic polypeptide
LTPAQVVAIASGGKQALETVQQLLPVLCQAHG

SEQ ID NO: 287 - protein, 32 aa, Artificial Sequence
  Description of Artificial Sequence: Synthetic polypeptide
LTPAQVVALASGGKQALETVQRLLPVLCQDHG

SEQ ID NO: 288 - protein, 32 aa, Artificial Sequence
  Description of Artificial Sequence: Synthetic polypeptide
LTPDQVVAIASGGRPALETVQRLLPVLCEQHG

SEQ ID NO: 289 - protein, 32 aa, Artificial Sequence
  Description of Artificial Sequence: Synthetic polypeptide
LTPDQVVAIASGGKQALATVQRLLPVLCQDHG

SEQ ID NO: 290 - protein, 32 aa, Artificial Sequence
  Description of Artificial Sequence: Synthetic polypeptide
LTQVQVVAIASGGKQALETVQRLLPVLCQAHG

SEQ ID NO: 291 - protein, 32 aa, Artificial Sequence
  Description of Artificial Sequence: Synthetic polypeptide
LTPDQVVAIARGGKQALETVQRLLPVLCQAHG

SEQ ID NO: 292 - protein, 32 aa, Artificial Sequence
  Description of Artificial Sequence: Synthetic polypeptide
LPPDQVVAIASGGKQALETVQRLLPVLCQAHG

SEQ ID NO: 293 - protein, 32 aa, Artificial Sequence
  Description of Artificial Sequence: Synthetic polypeptide
LTLDQVVAIASGSKQALETVQRLLPVLCQAHG

SEQ ID NO: 294 - protein, 32 aa, Artificial Sequence
  Description of Artificial Sequence: Synthetic polypeptide
LSPDQVVAIANGGKQALETLQRLLPVLCQTHA

SEQ ID NO: 295 - protein, 32 aa, Artificial Sequence
  Description of Artificial Sequence: Synthetic polypeptide
LNPDQVVAIASGGKQALETVQRLLPVLCQDHG

SEQ ID NO: 296 - protein, 32 aa, Artificial Sequence
  Description of Artificial Sequence: Synthetic polypeptide
LTPDQVMAIASGGKQALETVQRLLPVLCQDHG

SEQ ID NO: 297 - protein, 32 aa, Artificial Sequence
  Description of Artificial Sequence: Synthetic polypeptide
LTPAQVVAIASGGKQALETVRRLLPVLCQAHG

SEQ ID NO: 298 - protein, 32 aa, Artificial Sequence
  Description of Artificial Sequence: Synthetic polypeptide
LTPDQVVAIASGGKQTLETVQRLLPVLCQDHG

SEQ ID NO: 299 - protein, 32 aa, Artificial Sequence
  Description of Artificial Sequence: Synthetic polypeptide
LTPDQVMTIASGGKQALETVQRLLPVLCQDHG

SEQ ID NO: 300 - protein, 32 aa, Artificial Sequence
  Description of Artificial Sequence: Synthetic polypeptide
LTPAQVVTIASGGKQALETVQRLLPVLCQDHG

SEQ ID NO: 301 - protein, 32 aa, Artificial Sequence
  Description of Artificial Sequence: Synthetic polypeptide
LTPAQVVAIASGGKQALETVQRLLPVLCRAHG

SEQ ID NO: 302 - protein, 32 aa, Artificial Sequence
  Description of Artificial Sequence: Synthetic polypeptide
LSPDQVVAIASGGKQALETVQRLLPVLCQAHG

SEQ ID NO: 303 - protein, 32 aa, Artificial Sequence
  Description of Artificial Sequence: Synthetic polypeptide
LTPDQVVGIASGGKQALETVQRLLPVLCQDHG

SEQ ID NO: 304 - protein, 32 aa, Artificial Sequence
  Description of Artificial Sequence: Synthetic polypeptide
LTPDQVVAIASGGKQALETVQRLLPVLCQANG

SEQ ID NO: 305 - protein, 32 aa, Artificial Sequence
  Description of Artificial Sequence: Synthetic polypeptide
LTPAQVVAIASGGKQALETVQRLLPVLCQTHG

SEQ ID NO: 306 - protein, 32 aa, Artificial Sequence
  Description of Artificial Sequence: Synthetic polypeptide
LTPDQVVAIASGGKQALEMVQRLLPVLCQDHG

SEQ ID NO: 307 - protein, 32 aa, Artificial Sequence
  Description of Artificial Sequence: Synthetic polypeptide
LTPDQVVAIASGGKQALETMQRLLPVLCQDHG

SEQ ID NO: 308 - protein, 32 aa, Artificial Sequence
  Description of Artificial Sequence: Synthetic polypeptide
LTPDQVVAIANGGKQALATVQRLLPVLCQDHG

SEQ ID NO: 309 - protein, 32 aa, Artificial Sequence
  Description of Artificial Sequence: Synthetic polypeptide
LTPDQVVTIASGGKQALETVQRLLPVLCQAHG

SEQ ID NO: 310 - protein, 32 aa, Artificial Sequence
  Description of Artificial Sequence: Synthetic polypeptide
LTPDQVVAIASGGKQALETVQRLLTVLCQDHG

SEQ ID NO: 311 - protein, 32 aa, Artificial Sequence
  Description of Artificial Sequence: Synthetic polypeptide
MTPDQVVAIASGGKQALETVQRLLPVLCQDHG

SEQ ID NO: 312 - protein, 32 aa, Artificial Sequence
  Description of Artificial Sequence: Synthetic polypeptide
LAPDQVVAVASGGKQALETVQRLLPVLCQDHG

SEQ ID NO: 313 - protein, 32 aa, Artificial Sequence
  Description of Artificial Sequence: Synthetic polypeptide
LTPAQVVAIASGGKQALKTVQQLLPVLCEQHG

SEQ ID NO: 314 - protein, 32 aa, Artificial Sequence
  Description of Artificial Sequence: Synthetic polypeptide
LTPDQVVAIARGGKQALETVQRLLPVLCQDHG

SEQ ID NO: 315 - protein, 32 aa, Artificial Sequence
  Description of Artificial Sequence: Synthetic polypeptide
LTPDQVVAIASGGKQALETVQQLLPVLCQAHG

SEQ ID NO: 316 - protein, 32 aa, Artificial Sequence
  Description of Artificial Sequence: Synthetic polypeptide
LTPDQVLAIASGGKQALETLQRLLPVLCQDHG

SEQ ID NO: 317 - protein, 32 aa, Artificial Sequence
  Description of Artificial Sequence: Synthetic polypeptide
LTPEQVVAIARGGKQALETVQRLLPVLCQAHG

SEQ ID NO: 318 - protein, 32 aa, Artificial Sequence
  Description of Artificial Sequence: Synthetic polypeptide
LTPAQVVAIASGGKQALETMQRLLPVLCRAHG

SEQ ID NO: 319 - protein, 32 aa, Artificial Sequence
  Description of Artificial Sequence: Synthetic polypeptide
LTPDQVVAIANGGKQALEMVQRLLPVLCQDHG

SEQ ID NO: 320 - protein, 32 aa, Artificial Sequence
  Description of Artificial Sequence: Synthetic polypeptide
LTTDQVVTIASGGKQALETVQRLLPVLCQDHG

SEQ ID NO: 321 - protein, 32 aa, Artificial Sequence
  Description of Artificial Sequence: Synthetic polypeptide
LTPTQVMAIANGGKQALETVQRLLPVLCQDHG

SEQ ID NO: 322 - protein, 32 aa, Artificial Sequence
  Description of Artificial Sequence: Synthetic polypeptide
LTPQQVVAIASGGKQALETVQALLPVLCQAHG

SEQ ID NO: 323 - protein, 32 aa, Artificial Sequence
  Description of Artificial Sequence: Synthetic polypeptide
LTPDQVVAIASGGKQALETVQRLLPMLCQDHG

SEQ ID NO: 324 - protein, 32 aa, Artificial Sequence
  Description of Artificial Sequence: Synthetic polypeptide
LTSAQVVAIANGGKQALETVQRLLPVLCQDHG

SEQ ID NO: 325 - protein, 32 aa, Artificial Sequence
  Description of Artificial Sequence: Synthetic polypeptide
LTPDQVVAIASGGKQALETVQQLLPVLCQDHG

SEQ ID NO: 326 - protein, 32 aa, Artificial Sequence
  Description of Artificial Sequence: Synthetic polypeptide
LTPDQVVAIANGGKQALATVQRLLPVLCQAHG

SEQ ID NO: 327 - protein, 32 aa, Artificial Sequence
  Description of Artificial Sequence: Synthetic polypeptide
LTPAQVVAIASGGKQALETVQRLLPMLCQAHG

SEQ ID NO: 328 - protein, 32 aa, Artificial Sequence
  Description of Artificial Sequence: Synthetic polypeptide
LTLDQVVAIASGGKQALETVQRLLPVLCQARG

SEQ ID NO: 329 - protein, 32 aa, Artificial Sequence
  Description of Artificial Sequence: Synthetic polypeptide
LTPAQVVAIASGGKQALETLQRLLPVLCQDHG

SEQ ID NO: 330 - protein, 32 aa, Artificial Sequence
  Description of Artificial Sequence: Synthetic polypeptide
LTPDQVVAIANGGKQALETVQRLLPVLCQNHG

SEQ ID NO: 331 - protein, 32 aa, Artificial Sequence
  Description of Artificial Sequence: Synthetic polypeptide
LTPDQVVTIASGGKQALEMVQRLLPVLCQDHG

SEQ ID NO: 332 - protein, 32 aa, Artificial Sequence
  Description of Artificial Sequence: Synthetic polypeptide
LTPDQVVAIASGGKQALERVQRLLPVLCEQHG

SEQ ID NO: 333 - protein, 32 aa, Artificial Sequence
  Description of Artificial Sequence: Synthetic polypeptide
LTPEQVVAIACGGKQALETVQALLPVLRQAHG

SEQ ID NO: 334 - protein, 32 aa, Artificial Sequence
  Description of Artificial Sequence: Synthetic polypeptide
LTPDQVVAIASGGKQALETVQRLLPVLCRDHG

SEQ ID NO: 335 - protein, 32 aa, Artificial Sequence
  Description of Artificial Sequence: Synthetic polypeptide
LTPEQVVAIASGGKQALETVQRLLPMLCQAHG

SEQ ID NO: 336 - protein, 32 aa, Artificial Sequence
  Description of Artificial Sequence: Synthetic polypeptide
LTPEQVVAIACGGKQALETVQRLLPVLRHAHG

SEQ ID NO: 337 - protein, 32 aa, Artificial Sequence
  Description of Artificial Sequence: Synthetic polypeptide
LTPDQVVAIASGGKQALETVQRLLPVLCQHHG

SEQ ID NO: 338 - protein, 32 aa, Artificial Sequence
  Description of Artificial Sequence: Synthetic polypeptide
LIPDQVVAIASGGKQALETVQRLLPVLCQHHG

SEQ ID NO: 339 - protein, 32 aa, Artificial Sequence
  Description of Artificial Sequence: Synthetic polypeptide
LTRAQVVAIASGGKQALETVQRLLPVLCEQHG

SEQ ID NO: 340 - protein, 32 aa, Artificial Sequence
  Description of Artificial Sequence: Synthetic polypeptide
LTPDQVVAIANGGKQAVGTVQRLLPVLCQAHG

SEQ ID NO: 341 - protein, 32 aa, Artificial Sequence
  Description of Artificial Sequence: Synthetic polypeptide
LTLDQVVAIASGGKQALETVQRLLPVLCEQHG

SEQ ID NO: 342 - protein, 32 aa, Artificial Sequence
  Description of Artificial Sequence: Synthetic polypeptide
LTPAQVVAIASGGKQALETVQRLLPMLCQDHG

SEQ ID NO: 343 - protein, 32 aa, Artificial Sequence
  Description of Artificial Sequence: Synthetic polypeptide
LTPDQVVAIASGSKQALETMQRLLPVLCQDHG

SEQ ID NO: 344 - protein, 32 aa, Artificial Sequence
  Description of Artificial Sequence: Synthetic polypeptide
LTPDQVVAIASGGKQALETVQRLLPVLCKQHG

SEQ ID NO: 345 - protein, 32 aa, Artificial Sequence
  Description of Artificial Sequence: Synthetic polypeptide
LTLDQVVAIASGGKQALETVQRLLPVLCQTHG

SEQ ID NO: 346 - protein, 32 aa, Artificial Sequence
  Description of Artificial Sequence: Synthetic polypeptide
LTPDQVVAIASGGKQALEAVQRLLPVLCQDHG

SEQ ID NO: 347 - protein, 32 aa, Artificial Sequence
  Description of Artificial Sequence: Synthetic polypeptide
LTPAQVVTIASGGKQALETVQRLLPVLCEQHG

SEQ ID NO: 348 - protein, 32 aa, Artificial Sequence
  Description of Artificial Sequence: Synthetic polypeptide
LTPAQVMAIASGGKQALETVQRLLPVLCQDHG

SEQ ID NO: 349 - protein, 32 aa, Artificial Sequence
  Description of Artificial Sequence: Synthetic polypeptide
LTREQVVAIASGGKQALETVQRLLPVLRQAHG

SEQ ID NO: 350 - protein, 32 aa, Artificial Sequence
  Description of Artificial Sequence: Synthetic polypeptide
LTLAQVVAIANGGKQALETVQRLLPVLCQAHG

SEQ ID NO: 351 - protein, 32 aa, Artificial Sequence
  Description of Artificial Sequence: Synthetic polypeptide
LTLEQVVAIASGGKQALETVQRLLPVLCQAHG

SEQ ID NO: 352 - protein, 32 aa, Artificial Sequence
  Description of Artificial Sequence: Synthetic polypeptide
LTPQQVVAIASGGKQALETVQRLLPVLCEQHG

SEQ ID NO: 353 - protein, 32 aa, Artificial Sequence
  Description of Artificial Sequence: Synthetic polypeptide
LSPDQVVAIANGGKQALETVQRLLPVLCQDHG

SEQ ID NO: 354 - protein, 32 aa, Artificial Sequence
  Description of Artificial Sequence: Synthetic polypeptide
LTPDQVVAIANGGKQALETVQRLLPVLCQHHG

SEQ ID NO: 355 - protein, 32 aa, Artificial Sequence
  Description of Artificial Sequence: Synthetic polypeptide
LTPEQVVAIASGGKQALETVQALLPVLRQAHG

SEQ ID NO: 356 - protein, 32 aa, Artificial Sequence
  Description of Artificial Sequence: Synthetic polypeptide
LSQDQVVAIASGGKQALETVQRLLPVLCQDHG

SEQ ID NO: 357 - protein, 32 aa, Artificial Sequence
  Description of Artificial Sequence: Synthetic polypeptide
LPPEQVVAIASGGKQALETVQRLLPVLCQAHG

SEQ ID NO: 358 - protein, 32 aa, Artificial Sequence
  Description of Artificial Sequence: Synthetic polypeptide
LTPDQVVAIASGGKQALEAVQRLLPVLCQAHG

SEQ ID NO: 359 - protein, 32 aa, Artificial Sequence
  Description of Artificial Sequence: Synthetic polypeptide
LTPDQVVAIANGGKQALETVQRLLPVLCQEHG

SEQ ID NO: 360 - protein, 32 aa, Artificial Sequence
  Description of Artificial Sequence: Synthetic polypeptide
LTLDQVAAIASGGKQALETVQRLLPVLCQAHG

SEQ ID NO: 361 - protein, 32 aa, Artificial Sequence
  Description of Artificial Sequence: Synthetic polypeptide
LTPDQVVAIASGGKQALETVQRVLPVLCQDHG

SEQ ID NO: 362 - protein, 32 aa, Artificial Sequence
  Description of Artificial Sequence: Synthetic polypeptide
LIPAQVVAIASGGKQALETVQRLLPVLCQAHG

SEQ ID NO: 363 - protein, 32 aa, Artificial Sequence
  Description of Artificial Sequence: Synthetic polypeptide
LTPAQVVAIASGGKQALETVQRLLPVLRQAHG

SEQ ID NO: 364 - protein, 32 aa, Artificial Sequence
  Description of Artificial Sequence: Synthetic polypeptide
LTPAQVVAIASGSKQALETVQRLLPVLCQTHG

SEQ ID NO: 365 - protein, 32 aa, Artificial Sequence
  Description of Artificial Sequence: Synthetic polypeptide
LTPQQVVAIASGGKQALETVQRLLPVLCQDHG

SEQ ID NO: 366 - protein, 32 aa, Artificial Sequence
  Description of Artificial Sequence: Synthetic polypeptide
LTPDQVVAIANGGKQAVETVQRLLPVLCQAHG

SEQ ID NO: 367 - protein, 32 aa, Artificial Sequence
  Description of Artificial Sequence: Synthetic polypeptide
LSPDQVVTIASGGKQALETLQRLLPVLCQDHG

SEQ ID NO: 368 - protein, 32 aa, Artificial Sequence
  Description of Artificial Sequence: Synthetic polypeptide
LTPVQVVAIASGGKQALETVQRLLPVLCQAHG

SEQ ID NO: 369 - protein, 32 aa, Artificial Sequence
  Description of Artificial Sequence: Synthetic polypeptide
LTLDQVVAIASGSKQALETVQRLLPVLCQTHG

SEQ ID NO: 370 - protein, 32 aa, Artificial Sequence
  Description of Artificial Sequence: Synthetic polypeptide
LTPAQVVAIACGGKQALETVRRLLPVLCQAHG

SEQ ID NO: 371 - protein, 32 aa, Artificial Sequence
  Description of Artificial Sequence: Synthetic polypeptide
LTPAQVVAIASGSKQALETVQRLFPVLCQAHG

SEQ ID NO: 372 - protein, 32 aa, Artificial Sequence
  Description of Artificial Sequence: Synthetic polypeptide
LPPAQVVAIASGGKQALETVQRLLPVLCQAHG

SEQ ID NO: 373 - protein, 32 aa, Artificial Sequence
  Description of Artificial Sequence: Synthetic polypeptide
LTPDQVVAIASGGKQALETVQRLLPVLFQEHG

SEQ ID NO: 374 - protein, 32 aa, Artificial Sequence
  Description of Artificial Sequence: Synthetic polypeptide
LTPAKVVAIASGGKQALETVQRLLPVLCQDHG

SEQ ID NO: 375 - protein, 32 aa, Artificial Sequence
  Description of Artificial Sequence: Synthetic polypeptide
LTPVQVVAIASGGKQALATVQRLLPVLCQDHG

SEQ ID NO: 376 - protein, 32 aa, Artificial Sequence
  Description of Artificial Sequence: Synthetic polypeptide
LTPDQVVAIASGGKQALETVQRLLPGLCQDHG

SEQ ID NO: 377 - protein, 32 aa, Artificial Sequence
  Description of Artificial Sequence: Synthetic polypeptide
LTLAQVVAIANGGKQALETVQRLLPVLCQDHG

SEQ ID NO: 378 - protein, 32 aa, Artificial Sequence
  Description of Artificial Sequence: Synthetic polypeptide
LTPAQVVAIASGGKQALETVQRLLTVLCQDHG

SEQ ID NO: 379 - protein, 32 aa, Artificial Sequence
  Description of Artificial Sequence: Synthetic polypeptide
LPPAQVVAIASGGKQALETVQRLLPVLCQDHG

SEQ ID NO: 380 - protein, 32 aa, Artificial Sequence
  Description of Artificial Sequence: Synthetic polypeptide
LTPAQAVAIASGGKQALETVQRLLPVLCQAHG

SEQ ID NO: 381 - protein, 32 aa, Artificial Sequence
  Description of Artificial Sequence: Synthetic polypeptide
LTPAQVVAIVSGGKQALETVQRLLPVLCQTHG

SEQ ID NO: 382 - protein, 32 aa, Artificial Sequence
  Description of Artificial Sequence: Synthetic polypeptide
LTPDQVVAVAGGGKQALETVQRLLPVLCQDHG

SEQ ID NO: 383 - protein, 32 aa, Artificial Sequence
  Description of Artificial Sequence: Synthetic polypeptide
LTPDQVVAIASGGKQALGTVQRLLPVLCQAHG

SEQ ID NO: 384 - protein, 32 aa, Artificial Sequence
  Description of Artificial Sequence: Synthetic polypeptide
LPPAQVVAIASGGKQALETVQRLLPVLCEAHG

SEQ ID NO: 385 - protein, 32 aa, Artificial Sequence
  Description of Artificial Sequence: Synthetic polypeptide
LTTDQVVAIASGGKQALETVQRLLPVLCQDHG

SEQ ID NO: 386 - protein, 32 aa, Artificial Sequence
  Description of Artificial Sequence: Synthetic polypeptide
LTPDQVVAIANGGKQALETVQRLVPVLCQDHG

SEQ ID NO: 387 - protein, 32 aa, Artificial Sequence
  Description of Artificial Sequence: Synthetic polypeptide
LTPDQVVAIASGGKQALETVQRLLPVLCQTHA

SEQ ID NO: 388 - protein, 32 aa, Artificial Sequence
  Description of Artificial Sequence: Synthetic polypeptide
LTLAQVVAIASGGKQALETVQRLLPVLCQTHG

SEQ ID NO: 389 - protein, 32 aa, Artificial Sequence
  Description of Artificial Sequence: Synthetic polypeptide
LTPNQLVAIANGGKQALETVQRLLPVLCQDHG

SEQ ID NO: 390 - protein, 32 aa, Artificial Sequence
  Description of Artificial Sequence: Synthetic polypeptide
LSPAQVVAIASGSKQALETVQRLLPVLCQDHG

SEQ ID NO: 391 - protein, 32 aa, Artificial Sequence
  Description of Artificial Sequence: Synthetic polypeptide
LTPDQVVAIASGGKQALETVQRVLPVLCQAHG

SEQ ID NO: 392 - protein, 32 aa, Artificial Sequence
  Description of Artificial Sequence: Synthetic polypeptide
LTPDQVMAIANGGKQALETVQRLLPVLCQAHG

SEQ ID NO: 393 - protein, 32 aa, Artificial Sequence
  Description of Artificial Sequence: Synthetic polypeptide
LTPEQVVAIASGGRQALETVQRLLPVLCQAHG

SEQ ID NO: 394 - protein, 32 aa, Artificial Sequence
  Description of Artificial Sequence: Synthetic polypeptide
LTPAQVVAIASGGKQALETVQWLLPVLCQAHG

SEQ ID NO: 395 - protein, 32 aa, Artificial Sequence
  Description of Artificial Sequence: Synthetic polypeptide
LTPDKVVAIASGGKQALETVQRLLPVLCQDHG

SEQ ID NO: 396 - protein, 32 aa, Artificial Sequence
  Description of Artificial Sequence: Synthetic polypeptide
LTPAQVMAIANGGKQALETVQRLLPVLCQDHG

SEQ ID NO: 397 - protein, 32 aa, Artificial Sequence
  Description of Artificial Sequence: Synthetic polypeptide
LTQDQVVAIASGGKQALETVQRLLPVLCQANG

SEQ ID NO: 398 - protein, 32 aa, Artificial Sequence
  Description of Artificial Sequence: Synthetic polypeptide
LTPAQVVAIASGGKPALETVQRLLPVLCEQHG

SEQ ID NO: 399 - protein, 32 aa, Artificial Sequence
  Description of Artificial Sequence: Synthetic polypeptide
LTPDQVVAIASSGKQALETMQRLLPVLCQDHG

SEQ ID NO: 400 - protein, 32 aa, Artificial Sequence
  Description of Artificial Sequence: Synthetic polypeptide
LTPDQVVAIASGSKQALETVQRLLPVLRQDHG

SEQ ID NO: 401 - protein, 32 aa, Artificial Sequence
  Description of Artificial Sequence: Synthetic polypeptide
LTPYQVVAIASGSKQALETVQRLLPVLCQDHG

SEQ ID NO: 402 - protein, 32 aa, Artificial Sequence
  Description of Artificial Sequence: Synthetic polypeptide
LTPYQVVAIASGGKQALETVQRLLPVLCQAHG

SEQ ID NO: 403 - protein, 32 aa, Artificial Sequence
  Description of Artificial Sequence: Synthetic polypeptide
LTLDQVVAIASGGKQALETVQRLLPVLCQEHG

SEQ ID NO: 404 - protein, 32 aa, Artificial Sequence
  Description of Artificial Sequence: Synthetic polypeptide
LTLEQVVAIASGGKQALETVQRLLLVLCQAHG

SEQ ID NO: 405 - protein, 32 aa, Artificial Sequence
  Description of Artificial Sequence: Synthetic polypeptide
LTPDQVVAIASGGKQALETVRRLLQVLCQDHG

SEQ ID NO: 406 - protein, 32 aa, Artificial Sequence
  Description of Artificial Sequence: Synthetic polypeptide
LTPDQVVAIASGGKQALETVQRLLPVLRQDHG

SEQ ID NO: 407 - protein, 32 aa, Artificial Sequence
  Description of Artificial Sequence: Synthetic polypeptide
LTPDQVVSIANGGKQALETVQRLLPVLCQAHG

SEQ ID NO: 408 - protein, 32 aa, Artificial Sequence
  Description of Artificial Sequence: Synthetic polypeptide
LTPDQVVAIANGGKQALETVQRLLPVLCQTHG

SEQ ID NO: 409 - protein, 32 aa, Artificial Sequence
  Description of Artificial Sequence: Synthetic polypeptide
LTPDQVVAIASGGKQALETVKRLLPVLCQAHG

SEQ ID NO: 410 - protein, 32 aa, Artificial Sequence
  Description of Artificial Sequence: Synthetic polypeptide
LTTDQVVAIANGGKQALETVQRLLPVLCQDHG

SEQ ID NO: 411 - protein, 32 aa, Artificial Sequence
  Description of Artificial Sequence: Synthetic polypeptide
LIPQQVVAIASGGKQALETVQRLLPVLCQDHG

SEQ ID NO: 412 - protein, 32 aa, Artificial Sequence
  Description of Artificial Sequence: Synthetic polypeptide
LTLTQVVAIASGGKQALETVQRLLPVLCQAHG

SEQ ID NO: 413 - protein, 32 aa, Artificial Sequence
  Description of Artificial Sequence: Synthetic polypeptide
LTPTQVVAIASGGKQALETVQRLLPVLCQDHG

SEQ ID NO: 414 - protein, 32 aa, Artificial Sequence
  Description of Artificial Sequence: Synthetic polypeptide
LTPTQVMAIANGGKQALETVQRLLPVLCQAHG

SEQ ID NO: 415 - protein, 32 aa, Artificial Sequence
  Description of Artificial Sequence: Synthetic polypeptide
LTPDQVVAVASGGKQALETVQRLLPVLCQAHG

SEQ ID NO: 416 - protein, 32 aa, Artificial Sequence
  Description of Artificial Sequence: Synthetic polypeptide
LTPAQVVAIASGSKQALETVQRLLPVLCQDHG

SEQ ID NO: 417 - protein, 32 aa, Artificial Sequence
  Description of Artificial Sequence: Synthetic polypeptide
LTPGQVVAIASGGKRALETVQRLLPVLCQDHG

SEQ ID NO: 418 - protein, 32 aa, Artificial Sequence
  Description of Artificial Sequence: Synthetic polypeptide
LTPDQVVVIASGGKQALETVQRLLPVLCQAHG

SEQ ID NO: 419 - protein, 32 aa, Artificial Sequence
  Description of Artificial Sequence: Synthetic polypeptide
LPPDQVVAIASGSKQALETVQRLLPVLCQDHG

SEQ ID NO: 420 - protein, 32 aa, Artificial Sequence
  Description of Artificial Sequence: Synthetic polypeptide
LTPDQVVTIANGSKQALETVQRLLPVLCQAHG

SEQ ID NO: 421 - protein, 32 aa, Artificial Sequence
  Description of Artificial Sequence: Synthetic polypeptide
LTPAQVVAIASGGKQALETVQRLLQVLCQDHG

SEQ ID NO: 422 - protein, 32 aa, Artificial Sequence
  Description of Artificial Sequence: Synthetic polypeptide
LTPDHVVAIASGGKQALETVQRLLPVLCQDHG

SEQ ID NO: 423 - protein, 32 aa, Artificial Sequence
  Description of Artificial Sequence: Synthetic polypeptide
LTPDQVVAIASGGKQALETVQRLLQVLCQDHG

SEQ ID NO: 424 - protein, 32 aa, Artificial Sequence
  Description of Artificial Sequence: Synthetic polypeptide
LTPDQVVAIASGGRQALETVQRLLPVLCEQHG

SEQ ID NO: 425 - protein, 32 aa, Artificial Sequence
  Description of Artificial Sequence: Synthetic polypeptide
LHPGQVVAIASGGKQALETVQRLLPVLCQAHG

SEQ ID NO: 426 - protein, 32 aa, Artificial Sequence
  Description of Artificial Sequence: Synthetic polypeptide
LTLDQVVSIASGGKQALETVQRLLPVLCQDHG

SEQ ID NO: 427 - protein, 32 aa, Artificial Sequence
  Description of Artificial Sequence: Synthetic polypeptide
LTPDQVVAIASGGKQALETVQRLLPALCQDHG

SEQ ID NO: 428 - protein, 32 aa, Artificial Sequence
  Description of Artificial Sequence: Synthetic polypeptide
LTPDQVVAIASGGKPALETVQRLLPVLCEQHG

SEQ ID NO: 429 - protein, 32 aa, Artificial Sequence
  Description of Artificial Sequence: Synthetic polypeptide
LTPAQVVAIASGGKQALKTVQRLLPVLCQAHG

SEQ ID NO: 430 - protein, 32 aa, Artificial Sequence
  Description of Artificial Sequence: Synthetic polypeptide
LTPDQVVAIASGGKRALETVQRLLPVLCQAHG

SEQ ID NO: 431 - protein, 32 aa, Artificial Sequence
  Description of Artificial Sequence: Synthetic polypeptide
LNPDQVVAIASGGKQALETVQRLLPVLCQAHG

SEQ ID NO: 432 - protein, 32 aa, Artificial Sequence
  Description of Artificial Sequence: Synthetic polypeptide
LTPDQVVAIASGGKQALETVKRLLPVLCQDHG

SEQ ID NO: 433 - protein, 32 aa, Artificial Sequence
  Description of Artificial Sequence: Synthetic polypeptide
LTLDQVVAIANGGKQALETVQRLLPVLCQAHG

SEQ ID NO: 434 - protein, 32 aa, Artificial Sequence
  Description of Artificial Sequence: Synthetic polypeptide
LTPAQVVAIASGGKQALETVQRLLPVLCRDHG

SEQ ID NO: 435 - protein, 32 aa, Artificial Sequence
  Description of Artificial Sequence: Synthetic polypeptide
LTPAQVLAIASGGKQALETVQRLLTVLCQDHG

SEQ ID NO: 436 - protein, 32 aa, Artificial Sequence
  Description of Artificial Sequence: Synthetic polypeptide
LTPAQVVAIASGGKQALETMQRLLPVLCQDHG

SEQ ID NO: 437 - protein, 32 aa, Artificial Sequence
  Description of Artificial Sequence: Synthetic polypeptide
LTPDQVVAIASGGKQALETVQRLLPGLCQAHG

SEQ ID NO: 438 - protein, 32 aa, Artificial Sequence
  Description of Artificial Sequence: Synthetic polypeptide
LTREQVVAIASGGKQALETVQALLPVLRQAHG

SEQ ID NO: 439 - protein, 32 aa, Artificial Sequence
  Description of Artificial Sequence: Synthetic polypeptide
LTPAQVVAIASGGKQALETVQRLLPVLCQVHG

SEQ ID NO: 440 - protein, 32 aa, Artificial Sequence
  Description of Artificial Sequence: Synthetic polypeptide
LTPNQVVAIASGGKQALETVQRLLLVLCQDHG

SEQ ID NO: 441 - protein, 32 aa, Artificial Sequence
  Description of Artificial Sequence: Synthetic polypeptide
LTPDQVMAIASGGKQALETVQRLLPVLCQAHG

SEQ ID NO: 442 - protein, 32 aa, Artificial Sequence
  Description of Artificial Sequence: Synthetic polypeptide
LTREQVVAIASGGKQALETVQRLLPVLCQDHG

SEQ ID NO: 443 - protein, 33 aa, Artificial Sequence
  Description of Artificial Sequence: Synthetic polypeptide
LSTAQVVAIASGGKQALEGIGEQLLKLRTAPYG

SEQ ID NO: 444 - protein, 33 aa, Artificial Sequence
  Description of Artificial Sequence: Synthetic polypeptide
LSTAQVVAVASGGKPALEAVRAQLLALRAAPYG

SEQ ID NO: 445 - protein, 32 aa, Artificial Sequence
  Description of Artificial Sequence: Synthetic polypeptide
LTQVQVVAIASGGKQALETVQRLLPVLCQDHG

SEQ ID NO: 446 - protein, 32 aa, Artificial Sequence
  Description of Artificial Sequence: Synthetic polypeptide
LTPDQVVAIASNGKQALETVQRLLPVLCQDHG

SEQ ID NO: 447 - protein, 32 aa, Artificial Sequence
  Description of Artificial Sequence: Synthetic polypeptide
LTPDQVVAIASGGKRALETVQRLLPVLCQDHG

SEQ ID NO: 448 - DNA, 14 bp, Artificial Sequence
  Description of Artificial Sequence: Synthetic oligonucleotide
tttattccctgaca

SEQ ID NO: 449 - DNA, 18 bp, Artificial Sequence
  Description of Artificial Sequence: Synthetic oligonucleotide
tcggcccctgccggccca

SEQ ID NO: 450 - DNA, 20 bp, Artificial Sequence
  Description of Artificial Sequence: Synthetic oligonucleotide
tgcctgccctccaggctcct

SEQ ID NO: 451 - DNA, 40 bp, Homo sapiens
aaacggaagggcctgagtccgagcagaagaagaagtttta

SEQ ID NO: 452 - DNA, 40 bp, Homo sapiens
aggaggaagggcctgagtccgagcagaagaagaagggctc

SEQ ID NO: 453 - RNA, 26 nt, Artificial Sequence
  Description of Artificial Sequence: Synthetic oligonucleotide
gaguccgagcagaagaagaaguuuua

SEQ ID NO: 454 - DNA, 39 bp, Homo sapiens
aggaggaagggcctgagtccgagcagaagagaagggctc

SEQ ID NO: 455 - DNA, 39 bp, Homo sapiens
ggaggaagggcctgagtccgagcagaagaagaagggctc

SEQ ID NO: 456 - DNA, 38 bp, Homo sapiens
ggaggaagggcctgagtccgagcagaagagaagggctc

SEQ ID NO: 457 - DNA, 40 bp, Homo sapiens
ggaggaagggcctgagtccgagcagaagaaagaagggctc

SEQ ID NO: 458 - DNA, 37 bp, Homo sapiens
ggaggaagggcctgagtccgagcagaaggaagggctc

SEQ ID NO: 459 - DNA, 36 bp, Homo sapiens
ggaggaagggcctgagtccgagcagaagaagggctc

SEQ ID NO: 460 - DNA, 33 bp, Homo sapiens
ggaggaagggcctgagtccgagcagaagggctc

SEQ ID NO: 461 - DNA, 33 bp, Homo sapiens
ggaggaagggcctgagcccgagcagaagggctc

SEQ ID NO: 462 - DNA, 122 bp, Homo sapiens
ggaggaagggcctgagtccgagcagaagaagaagggctcccatcacatcaaccggtggcgcattgccacgaagcaggccaatggggaggacatcgatgtcacctccaatgactagggtgggc

SEQ ID NO: 463 - RNA, 48 nt, Artificial Sequence
  Description of Artificial Sequence: Synthetic oligonucleotide
  modified_base (3)..(32): a, c, u, g, unknown or other
acnnnnnnnnnnnnnnnnnnnnnnnnnnnnnnguuuuagagcuaugcu

SEQ ID NO: 464 - DNA, 67 bp, Artificial Sequence
  Description of Artificial Sequence: Synthetic oligonucleotide
  Description of Combined DNA/RNA Molecule: Synthetic oligonucleotide
agcauagcaaguuaaaauaaggctaguccguuaucaacuugaaaaaguggcaccgagucggugcuuu

SEQ ID NO: 465 - RNA, 62 nt, Artificial Sequence
  Description of Artificial Sequence: Synthetic oligonucleotide
  modified_base (1)..(20): a, c, u, g, unknown or other
nnnnnnnnnnnnnnnnnnnnguuuuagagcuagaaauagcaaguuaaaauaaggcuaguccg

SEQ ID NO: 466 - DNA, 48 bp, Homo sapiens
ctggaggaggaagggcctgagtccgagcagaagaagaagggctcccat

SEQ ID NO: 467 - RNA, 30 nt, Artificial Sequence
  Description of Artificial Sequence: Synthetic oligonucleotide
gaguccgagcagaagaagaaguuuuagagc

SEQ ID NO: 468 - RNA, 20 nt, Homo sapiens
gaguccgagcagaagaagau

SEQ ID NO: 469 - RNA, 20 nt, Homo sapiens
gaguccgagcagaagaagua

SEQ ID NO: 470 - RNA, 20 nt, Homo sapiens
gaguccgagcagaagaacaa

SEQ ID NO: 471 - RNA, 20 nt, Homo sapiens
gaguccgagcagaagaugaa

SEQ ID NO: 472 - RNA, 20 nt, Homo sapiens
gaguccgagcagaaguagaa

SEQ ID NO: 473 - RNA, 20 nt, Homo sapiens
gaguccgagcagaugaagaa

SEQ ID NO: 474 - RNA, 20 nt, Homo sapiens
gaguccgagcacaagaagaa

SEQ ID NO: 475 - RNA, 20 nt, Homo sapiens
gaguccgaggagaagaagaa

SEQ ID NO: 476 - RNA, 20 nt, Homo sapiens
gaguccgugcagaagaagaa

SEQ ID NO: 477 - RNA, 20 nt, Homo sapiens
gagucggagcagaagaagaa

SEQ ID NO: 478 - RNA, 20 nt, Homo sapiens
gagaccgagcagaagaagaa

SEQ ID NO: 479 - DNA, 24 bp, Artificial Sequence
  Description of Artificial Sequence: Synthetic oligonucleotide
aatgacaagcttgctagcggtggg

SEQ ID NO: 480 - DNA, 39 bp, Homo sapiens
aaaacggaagggcctgagtccgagcagaagaagaagttt

SEQ ID NO: 481 - DNA, 39 bp, Homo sapiens
aaacaggggccgagattgggtgttcagggcagaggtttt

SEQ ID NO: 482 - DNA, 38 bp, Homo sapiens
aaaacggaagggcctgagtccgagcagaagaagaagtt

SEQ ID NO: 483 - DNA, 40 bp, Homo sapiens
aacggagggaggggcacagatgagaaactcagggttttag

SEQ ID NO: 484 - DNA, 38 bp, Homo sapiens
agcccttcttcttctgctcggactcaggcccttcctcc

SEQ ID NO: 485 - DNA, 40 bp, Homo sapiens
cagggagggaggggcacagatgagaaactcaggaggcccc

SEQ ID NO: 486 - DNA, 80 bp, Artificial Sequence
  Description of Artificial Sequence: Synthetic oligonucleotide
ggcaatgcgccaccggttgatgtgatgggagcccttctaggaggcccccagagcagccactggggcctcaacactcaggc

SEQ ID NO: 487 - DNA, 98 bp, Artificial Sequence
  Description of Artificial Sequence: Synthetic oligonucleotide
ggacgaaacaccggaaccattcaaaacagcatagcaagttaaaataaggctagtccgttatcaacttgaaaaagtggcaccgagtcggtgcttttttt

SEQ ID NO: 488 - DNA, 186 bp, Artificial Sequence
  Description of Artificial Sequence: Synthetic polynucleotide
ggacgaaacaccggtagtattaagtattgttttatggctgataaatttctttgaatttctccttgattatttgttataaaagttataaaataatcttgttggaaccattcaaaacagcatagcaagttaaaataaggctagtccgttatcaacttgaaaaagtggcaccgagtcggtgcttttttt

SEQ ID NO: 489 - DNA, 73 bp, Artificial Sequence
  Description of Artificial Sequence: Synthetic oligonucleotide
tgaatggtcccaaaacggaagggcctgagtccgagcagaagaagaagttttagagctatgctgttttgaatgg

SEQ ID NO: 490 - DNA, 95 bp, Artificial Sequence
  Description of Artificial Sequence: Synthetic oligonucleotide
gggttttagagctatgctgttttgaatggtcccaaaacgggtcttcgagaagacgttttagagctatgctgttttgaatggtcccaaaacttttt

SEQ ID NO: 491 - DNA, 36 bp, Artificial Sequence
  Description of Artificial Sequence: Synthetic oligonucleotide
  modified_base (5)..(34): a, c, t, g, unknown or other
aaacnnnnnnnnnnnnnnnnnnnnnnnnnnnnnngt

SEQ ID NO: 492 - DNA, 36 bp, Artificial Sequence
  Description of Artificial Sequence: Synthetic oligonucleotide
  modified_base (7)..(36): a, c, t, g, unknown or other
taaaacnnnnnnnnnnnnnnnnnnnnnnnnnnnnnn

SEQ ID NO: 493 - DNA, 84 bp, Artificial Sequence
  Description of Artificial Sequence: Synthetic oligonucleotide
gtggaaaggacgaaacaccgggtcttcgagaagacctgttttagagctagaaatagcaagttaaaataaggctagtccgttttt

SEQ ID NO: 494 - DNA, 24 bp, Artificial Sequence
  Description of Artificial Sequence: Synthetic oligonucleotide
  modified_base (6)..(24): a, c, t, g, unknown or other
caccgnnnnnnnnnnnnnnnnnnn

SEQ ID NO: 495 - DNA, 24 bp, Artificial Sequence
  Description of Artificial Sequence: Synthetic oligonucleotide
  modified_base (5)..(23): a, c, t, g, unknown or other
aaacnnnnnnnnnnnnnnnnnnnc

SEQ ID NO: 496 - DNA, 69 bp, Homo sapiens
ctggtcttccacctctctgccctgaacacccaatctcggcccctctcgccaccctcctgcatttctgtt

SEQ ID NO: 497 - DNA, 138 bp, Mus sp.
acccaagcactgagtgccattagctaaatgcatagggtaccacccacaggtgccaggggcctttcccaaagttcccagccccttctccaacctttcctggcccagaggctttcccatgtgtgtggctggaccctttga

SEQ ID NO: 498 - RNA, 46 nt, Artificial Sequence
  Description of Artificial Sequence: Synthetic oligonucleotide
  modified_base (1)..(19): a, c, u, g, unknown or other
nnnnnnnnnnnnnnnnnnnguuauuguacucucaagauuuauuuuu

SEQ ID NO: 499 - RNA, 91 nt, Artificial Sequence
  Description of Artificial Sequence: Synthetic oligonucleotide
guuacuuaaaucuugcagaagcuacaaagauaaggcuucaugccgaaaucaacacccugucauuuuauggcaggguguuuucguuauuuaa

SEQ ID NO: 500 - DNA, 70 bp, Homo sapiens
ttttctagtgctgagtttctgtgactcctctacattctacttctctgtgtttctgtatactacctcctcc

SEQ ID NO: 501 - protein, 17 aa, Artificial Sequence
  Description of Artificial Sequence: Synthetic peptide
KRKFDTETKDCNEKKKK

SEQ ID NO: 502 - protein, 10 aa, Artificial Sequence
  Description of Artificial Sequence: Synthetic peptide
LKALGSDLTL

SEQ ID NO: 503 - protein, 4 aa, Artificial Sequence
  Description of Artificial Sequence: Synthetic peptide
RRGQ

SEQ ID NO: 504 - protein, 5 aa, Artificial Sequence
  Description of Artificial Sequence: Synthetic peptide
RVRRE

SEQ ID NO: 505 - DNA, 14 bp, Artificial Sequence
  Description of Artificial Sequence: Synthetic oligonucleotide
tctgcaagagtagg

SEQ ID NO: 506 - DNA, 14 bp, Artificial Sequence
  Description of Artificial Sequence: Synthetic oligonucleotide
tgcactccaccttg

SEQ ID NO: 507 - DNA, 14 bp, Artificial Sequence
  Description of Artificial Sequence: Synthetic oligonucleotide
tcaagcagcttctc

SEQ ID NO: 508 - DNA, 23 bp, Homo sapiens
gccccctttcatgcaaaacccgg

SEQ ID NO: 509 - DNA, 20 bp, Homo sapiens
gccccctttcatgcaaaacc

SEQ ID NO: 510 - DNA, 276 bp, Homo sapiens
cgcccatggccgcgcgcgctccacacaactcaccggagtccgcgccttgcgccgccgaccagttcgcagctccgcgccacggcagccagtctctgagtggaagagagcgcagcccggccaccggacctacttactcgccttgctgattgtctatttttgcgtttacaacttttctaagaacttttgtatacaaaggaactttttaaaaaagacgcttccaagttatatttaatccaaagaagaaggatctcggccaatttggggttttgggttttg

SEQ ID NO: 511 - DNA, 151 bp, Homo sapiens
tcccccgcgcggccggcggcgcgggaggccccgccccctttcatgcaaaacccggcagcgaggctgggctcgagtggaggagccgccgcgcgctgattggtcgctagaaacccatttattccctgacagcccccgtcacatggatggttgt

SEQ ID NO: 512 - DNA, 30 bp, Homo sapiens
gaagccgccgggcccgcagcaaacttcggg

SEQ ID NO: 513 - DNA, 30 bp, Homo sapiens
ccctacatgttgtactacctctgcctcgac

SEQ ID NO: 514 - DNA, 23 bp, Artificial Sequence
  Description of Artificial Sequence: Synthetic oligonucleotide
  modified_base (9)..(20): a, c, t, or g
  modified_base (21)..(21): a, c, t, g, unknown or other
mmmmmmmmnnnnnnnnnnnnngg

SEQ ID NO: 515 - DNA, 15 bp, Artificial Sequence
  Description of Artificial Sequence: Synthetic oligonucleotide
  modified_base (1)..(12): a, c, t, or g
  modified_base (13)..(13): a, c, t, g, unknown or other
nnnnnnnnnnnnngg

SEQ ID NO: 516 - DNA, 23 bp, Artificial Sequence
  Description of Artificial Sequence: Synthetic oligonucleotide
  modified_base (10)..(20): a, c, t, or g
  modified_base (21)..(21): a, c, t, g, unknown or other
mmmmmmmmmnnnnnnnnnnnngg

SEQ ID NO: 517 - DNA, 14 bp, Artificial Sequence
  Description of Artificial Sequence: Synthetic oligonucleotide
  modified_base (1)..(11): a, c, t, or g
  modified_base (12)..(12): a, c, t, g, unknown or other
nnnnnnnnnnnngg

SEQ ID NO: 518 - DNA, 27 bp, Artificial Sequence
  Description of Artificial Sequence: Synthetic oligonucleotide
  modified_base (9)..(20): a, c, t, or g
  modified_base (21)..(22): a, c, t, g, unknown or other
mmmmmmmmnnnnnnnnnnnnnnagaaw

SEQ ID NO: 519 - DNA, 19 bp, Artificial Sequence
  Description of Artificial Sequence: Synthetic oligonucleotide
  modified_base (1)..(12): a, c, t, or g
  modified_base (13)..(14): a, c, t, g, unknown or other
nnnnnnnnnnnnnnagaaw

SEQ ID NO: 520 - DNA, 27 bp, Artificial Sequence
  Description of Artificial Sequence: Synthetic oligonucleotide
  modified_base (10)..(20): a, c, t, or g
  modified_base (21)..(22): a, c, t, g, unknown or other
mmmmmmmmmnnnnnnnnnnnnnagaaw

SEQ ID NO: 521 - DNA, 18 bp, Artificial Sequence
  Description of Artificial Sequence: Synthetic oligonucleotide
  modified_base (1)..(11): a, c, t, or g
  modified_base (12)..(13): a, c, t, g, unknown or other
nnnnnnnnnnnnnagaaw

SEQ ID NO: 522 - DNA, 25 bp, Artificial Sequence
  Description of Artificial Sequence: Synthetic oligonucleotide
  modified_base (9)..(20): a, c, t, or g
  modified_base (21)..(21): a, c, t, g, unknown or other
  modified_base (24)..(24): a, c, t, g, unknown or other
mmmmmmmmnnnnnnnnnnnnnggng

SEQ ID NO: 523 - DNA, 17 bp, Artificial Sequence
  Description of Artificial Sequence: Synthetic oligonucleotide
  modified_base (1)..(12): a, c, t, or g
  modified_base (13)..(13): a, c, t, g, unknown or other
  modified_base (16)..(16): a, c, t, g, unknown or other
nnnnnnnnnnnnnggng

SEQ ID NO: 524 - DNA, 25 bp, Artificial Sequence
  Description of Artificial Sequence: Synthetic oligonucleotide
  modified_base (10)..(20): a, c, t, or g
  modified_base (21)..(21): a, c, t, g, unknown or other
  modified_base (24)..(24): a, c, t, g, unknown or other
mmmmmmmmmnnnnnnnnnnnnggng

SEQ ID NO: 525 - DNA, 16 bp, Artificial Sequence
  Description of Artificial Sequence: Synthetic oligonucleotide
  modified_base (1)..(11): a, c, t, or g
  modified_base (12)..(12): a, c, t, g, unknown or other
  modified_base (15)..(15): a, c, t, g, unknown or other
nnnnnnnnnnnnggng

SEQ ID NO: 526 - DNA, 137 bp, Artificial Sequence
  Description of Artificial Sequence: Synthetic polynucleotide
  modified_base (1)..(20): a, c, t, g, unknown or other
nnnnnnnnnnnnnnnnnnnngtttttgtactctcaagatttagaaataaatcttgcagaagctacaaagataaggcttcatgccgaaatcaacaccctgtcattttatggcagggtgttttcgttatttaatttttt

SEQ ID NO: 527 - DNA, 123 bp, Artificial Sequence
  Description of Artificial Sequence: Synthetic polynucleotide
  modified_base (1)..(20): a, c, t, g, unknown or other
nnnnnnnnnnnnnnnnnnnngtttttgtactctcagaaatgcagaagctacaaagataaggcttcatgccgaaatcaacaccctgtcattttatggcagggtgttttcgttatttaatttttt

SEQ ID NO: 528 - DNA, 110 bp, Artificial Sequence
  Description of Artificial Sequence: Synthetic polynucleotide
  modified_base (1)..(20): a, c, t, g, unknown or other
nnnnnnnnnnnnnnnnnnnngtttttgtactctcagaaatgcagaagctacaaagataaggcttcatgccgaaatcaacaccctgtcattttatggcagggtgttttttt

SEQ ID NO: 529 - DNA, 102 bp, Artificial Sequence
  Description of Artificial Sequence: Synthetic polynucleotide
  modified_base (1)..(20): a, c, t, g, unknown or other
nnnnnnnnnnnnnnnnnnnngttttagagctagaaatagcaagttaaaataaggctagtccgttatcaacttgaaaaagtggcaccgagtcggtgctttttt

SEQ ID NO: 530 - DNA, 88 bp, Artificial Sequence
  Description of Artificial Sequence: Synthetic oligonucleotide
  modified_base (1)..(20): a, c, t, g, unknown or other
nnnnnnnnnnnnnnnnnnnngttttagagctagaaatagcaagttaaaataaggctagtccgttatcaacttgaaaaagtgttttttt

SEQ ID NO: 531 - DNA, 76 bp, Artificial Sequence
  Description of Artificial Sequence: Synthetic oligonucleotide
  modified_base (1)..(20): a, c, t, g, unknown or other
nnnnnnnnnnnnnnnnnnnngttttagagctagaaatagcaagttaaaataaggctagtccgttatcatttttttt

SEQ ID NO: 532 - protein, 4 aa, Unknown
  Description of Unknown: 'DEAD' box family motif peptide
DEAD

SEQ ID NO: 533 - protein, 4 aa, Unknown
  Description of Unknown: 'DEAN' box family motif peptide
DEAN

SEQ ID NO: 534 - DNA, 11 bp, Artificial Sequence
  Description of Artificial Sequence: Synthetic oligonucleotide
gtttagagcta

SEQ ID NO: 535 - DNA, 31 bp, Artificial Sequence
  Description of Artificial Sequence: Synthetic oligonucleotide
tagcaagttaaaataaggctagtccgttttt

SEQ ID NO: 536 - DNA, 27 bp, Artificial Sequence
  Description of Artificial Sequence: Synthetic oligonucleotide
  modified_base (1)..(22): a, c, t, g, unknown or other
nnnnnnnnnnnnnnnnnnnnnnagaaw

SEQ ID NO: 537 - protein, 1648 aa, Artificial Sequence
  Description of Artificial Sequence: Synthetic polypeptide
MDYKDHDGDYKDHDIDYKDDDDKMAPKKKRKVGIHGVPAADKKYSIGLDIGTNSVGWAVITDEYKVPSKKFKVLGNTDRHSIKKNLIGALLFDSGETAEATRLKRTARRRYTRRKNRICYLQEIFSNEMAKVDDSFFHRLEESFLVEEDKKHERHPIFGNIVDEVAYHEKYPTIYHLRKKLVDSTDKADLRLIYLALAHMIKFRGHFLIEGDLNPDNSDVDKLFIQLVQTYNQLFEENPINASGVDAKAILSARLSKSRRLENLIAQLPGEKKNGLFGNLIALSLGLTPNFKSNFDLAEDAKLQLSKDTYDDDLDNLLAQIGDQYADLFLAAKNLSDAILLSDILRVNTEITKAPLSASMIKRYDEHHQDLTLLKALVRQQLPEKYKEIFFDQSKNGYAGYIDGGASQEEFYKFIKPILEKMDGTEELLVKLNREDLLRKQRTFDNGSIPHQIHLGELHAILRRQEDFYPFLKDNREKIEKILTFRIPYYVGPLARGNSRFAWMTRKSEETITPWNFEEVVDKGASAQSFIERMTNFDKNLPNEKVLPKHSLLYEYFTVYNELTKVKYVTEGMRKPAFLSGEQKKAIVDLLFKTNRKVTVKQLKEDYFKKIECFDSVEISGVEDRFNASLGTYHDLLKIIKDKDFLDNEENEDILEDIVLTLTLFEDREMIEERLKTYAHLFDDKVMKQLKRRRYTGWGRLSRKLINGIRDKQSGKTILDFLKSDGFANRNFMQLIHDDSLTFKEDIQKAQVSGQGDSLHEHIANLAGSPAIKKGILQTVKVVDELVKVMGRHKPENIVIEMARENQTTQKGQKNSRERMKRIEEGIKELGSQILKEHPVENTQLQNEKLYLYYLQNGRDMYVDQELDINRLSDYDVDHIVPQSFLKDDSIDNKVLTRSDKNRGKSDNVPSEEVVKKMKNYWRQLLNAKLITQRKFDNLTKAERGGLSELDKAGFIKRQLVETRQITKHVAQILDSRMNTKYDENDKLIREVKVITLKSKLVSDFRKDFQFYKVREINNYHHAHDAYLNAVVGTALIKKYPKLESEFVYGDYKVYDVRKMIAKSEQEIGKATAKYFFYSNIMNFFKTEITLANGEIRKRPLIETNGETGEIVWDKGRDFATVRKVLSMPQVNIVKKTEVQTGGFSKESILPKRNSDKLIARKKDWDPKKYGGFDSPTVAYSVLVVAKVEKGKSKKLKSVKELLGITIMERSSFEKNPIDFLEAKGYKEVKKDLIIKLPKYSLFELENGRKRMLASAGELQKGNELALPSKYVNFLYLASHYEKLKGSPEDNEQKQLFVEQHKHYLDEIIEQISEFSKRVILADANLDKVLSAYNKHRDKPIREQAENIIHLFTLTNLGAPAAFKYFDTTIDRKRYTSTKEVLDATLIHQSITGLYETRIDLSQLGGDAAAVSKGEELFTGVVPILVELDGDVNGHKFSVSGEGEGDATYGKLTLKFICTTGKLPVPWPTLVTTLTYGVQCFSRYPDHMKQHDFFKSAMPEGYVQERTIFFKDDGNYKTRAEVKFEGDTLVNRIELKGIDFKEDGNILGHKLEYNYNSHNVYIMADKQKNGIKVNFKIRHNIEDGSVQLADHYQQNTPIGDGPVLLPDNHYLSTQSALSKDPNEKRDHMVLLEFVTAAGITLGMDELYK

SEQ ID NO: 538 - protein, 1625 aa, Artificial Sequence
  Description of Artificial Sequence: Synthetic polypeptide
MDKKYSIGLDIGTNSVGWAVITDEYKVPSKKFKVLGNTDRHSIKKNLIGALLFDSGETAEATRLKRTARRRYTRRKNRICYLQEIFSNEMAKVDDSFFHRLEESFLVEEDKKHERHPIFGNIVDEVAYHEKYPTIYHLRKKLVDSTDKADLRLIYLALAHMIKFRGHFLIEGDLNPDNSDVDKLFIQLVQTYNQLFEENPINASGVDAKAILSARLSKSRRLENLIAQLPGEKKNGLFGNLIALSLGLTPNFKSNFDLAEDAKLQLSKDTYDDDLDNLLAQIGDQYADLFLAAKNLSDAILLSDILRVNTEITKAPLSASMIKRYDEHHQDLTLLKALVRQQLPEKYKEIFFDQSKNGYAGYIDGGASQEEFYKFIKPILEKMDGTEELLVKLNREDLLRKQRTFDNGSIPHQIHLGELHAILRRQEDFYPFLKDNREKIEKILTFRIPYYVGPLARGNSRFAWMTRKSEETITPWNFEEVVDKGASAQSFIERMTNFDKNLPNEKVLPKHSLLYEYFTVYNELTKVKYVTEGMRKPAFLSGEQKKAIVDLLFKTNRKVTVKQLKEDYFKKIECFDSVEISGVEDRFNASLGTYHDLLKIIKDKDFLDNEENEDILEDIVLTLTLFEDREMIEERLKTYAHLFDDKVMKQLKRRRYTGWGRLSRKLINGIRDKQSGKTILDFLKSDGFANRNFMQLIHDDSLTFKEDIQKAQVSGQGDSLHEHIANLAGSPAIKKGILQTVKVVDELVKVMGRHKPENIVIEMARENQTTQKGQKNSRERMKRIEEGIKELGSQILKEHPVENTQLQNEKLYLYYLQNGRDMYVDQELDINRLSDYDVDHIVPQSFLKDDSIDNKVLTRSDKNRGKSDNVPSEEVVKKMKNYWRQLLNAKLITQRKFDNLTKAERGGLSELDKAGFIKRQLVETRQITKHVAQILDSRMNTKYDENDKLIREVKVITLKSKLVSDFRKDFQFYKVREINNYHHAHDAYLNAVVGTALIKKYPKLESEFVYGDYKVYDVRKMIAKSEQEIGKATAKYFFYSNIMNFFKTEITLANGEIRKRPLIETNGETGEIVWDKGRDFATVRKVLSMPQVNIVKKTEVQTGGFSKESILPKRNSDKLIARKKDWDPKKYGGFDSPTVAYSVLVVAKVEKGKSKKLKSVKELLGITIMERSSFEKNPIDFLEAKGYKEVKKDLIIKLPKYSLFELENGRKRMLASAGELQKGNELALPSKYVNFLYLASHYEKLKGSPEDNEQKQLFVEQHKHYLDEIIEQISEFSKRVILADANLDKVLSAYNKHRDKPIREQAENIIHLFTLTNLGAPAAFKYFDTTIDRKRYTSTKEVLDATLIHQSITGLYETRIDLSQLGGDAAAVSKGEELFTGVVPILVELDGDVNGHKFSVSGEGEGDATYGKLTLKFICTTGKLPVPWPTLVTTLTYGVQCFSRYPDHMKQHDFFKSAMPEGYVQERTIFFKDDGNYKTRAEVKFEGDTLVNRIELKGIDFKEDGNILGHKLEYNYNSHNVYIMADKQKNGIKVNFKIRHNIEDGSVQLADHYQQNTPIGDGPVLLPDNHYLSTQSALSKDPNEKRDHMVLLEFVTAAGITLGMDELYKKRPAATKKAGQAKKKK

SEQ ID NO: 539 - protein, 1664 aa, Artificial Sequence
  Description of Artificial Sequence: Synthetic polypeptide
MDYKDHDGDYKDHDIDYKDDDDKMAPKKKRKVGIHGVPAADKKYSIGLDIGTNSVGWAVITDEYKVPSKKFKVLGNTDRHSIKKNLIGALLFDSGETAEATRLKRTARRRYTRRKNRICYLQEIFSNEMAKVDDSFFHRLEESFLVEEDKKHERHPIFGNIVDEVAYHEKYPTIYHLRKKLVDSTDKADLRLIYLALAHMIKFRGHFLIEGDLNPDNSDVDKLFIQLVQTYNQLFEENPINASGVDAKAILSARLSKSRRLENLIAQLPGEKKNGLFGNLIALSLGLTPNFKSNFDLAEDAKLQLSKDTYDDDLDNLLAQIGDQYADLFLAAKNLSDAILLSDILRVNTEITKAPLSASMIKRYDEHHQDLTLLKALVRQQLPEKYKEIFFDQSKNGYAGYIDGGASQEEFYKFIKPILEKMDGTEELLVKLNREDLLRKQRTFDNGSIPHQIHLGELHAILRRQEDFYPFLKDNREKIEKILTFRIPYYVGPLARGNSRFAWMTRKSEETITPWNFEEVVDKGASAQSFIERMTNFDKNLPNEKVLPKHSLLYEYFTVYNELTKVKYVTEGMRKPAFLSGEQKKAIVDLLFKTNRKVTVKQLKEDYFKKIECFDSVEISGVEDRFNASLGTYHDLLKIIKDKDFLDNEENEDILEDIVLTLTLFEDREMIEERLKTYAHLFDDKVMKQLKRRRYTGWGRLSRKLINGIRDKQSGKTILDFLKSDGFANRNFMQLIHDDSLTFKEDIQKAQVSGQGDSLHEHIANLAGSPAIKKGILQTVKVVDELVKVMGRHKPENIVIEMARENQTTQKGQKNSRERMKRIEEGIKELGSQILKEHPVENTQLQNEKLYLYYLQNGRDMYVDQELDINRLSDYDVDHIVPQSFLKDDSIDNKVLTRSDKNRGKSDNVPSEEVVKKMKNYWRQLLNAKLITQRKFDNLTKAERGGLSELDKAGFIKRQLVETRQITKHVAQILDSRMNTKYDENDKLIREVKVITLKSKLVSDFRKDFQFYKVREINNYHHAHDAYLNAVVGTALIKKYPKLESEFVYGDYKVYDVRKMIAKSEQEIGKATAKYFFYSNIMNFFKTEITLANGEIRKRPLIETNGETGEIVWDKGRDFATVRKVLSMPQVNIVKKTEVQTGGFSKESILPKRNSDKLIARKKDWDPKKYGGFDSPTVAYSVLVVAKVEKGKSKKLKSVKELLGITIMERSSFEKNPIDFLEAKGYKEVKKDLIIKLPKYSLFELENGRKRMLASAGELQKGNELALPSKYVNFLYLASHYEKLKGSPEDNEQKQLFVEQHKHYLDEIIEQISEFSKRVILADANLDKVLSAYNKHRDKPIREQAENIIHLFTLTNLGAPAAFKYFDTTIDRKRYTSTKEVLDATLIHQSITGLYETRIDLSQLGGDAAAVSKGEELFTGVVPILVELDGDVNGHKFSVSGEGEGDATYGKLTLKFICTTGKLPVPWPTLVTTLTYGVQCFSRYPDHMKQHDFFKSAMPEGYVQERTIFFKDDGNYKTRAEVKFEGDTLVNRIELKGIDFKEDGNILGHKLEYNYNSHNVYIMADKQKNGIKVNFKIRHNIEDGSVQLADHYQQNTPIGDGPVLLPDNHYLSTQSALSKDPNEKRDHMVLLEFVTAAGITLGMDELYKKRPAATKKAGQAKKKK

SEQ ID NO: 540 - protein, 1423 aa, Artificial Sequence
  Description of Artificial Sequence: Synthetic polypeptide
MDYKDHDGDYKDHDIDYKDDDDKMAPKKKRKVGIHGVPAADKKYSIGLDIGTNSVGWAVITDEYKVPSKKFKVLGNTDRHSIKKNLIGALLFDSGETAEATRLKRTARRRYTRRKNRICYLQEIFSNEMAKVDDSFFHRLEESFLVEEDKKHERHPIFGNIVDEVAYHEKYPTIYHLRKKLVDSTDKADLRLIYLALAHMIKFRGHFLIEGDLNPDNSDVDKLFIQLVQTYNQLFEENPINASGVDAKAILSARLSKSRRLENLIAQLPGEKKNGLFGNLIALSLGLTPNFKSNFDLAEDAKLQLSKDTYDDDLDNLLAQIGDQYADLFLAAKNLSDAILLSDILRVNTEITKAPLSASMIKRYDEHHQDLTLLKALVRQQLPEKYKEIFFDQSKNGYAGYIDGGASQEEFYKFIKPILEKMDGTEELLVKLNREDLLRKQRTFDNGSIPHQIHLGELHAILRRQEDFYPFLKDNREKIEKILTFRIPYYVGPLARGNSRFAWMTRKSEETITPWNFEEVVDKGASAQSFIERMTNFDKNLPNEKVLPKHSLLYEYFTVYNELTKVKYVTEGMRKPAFLSGEQKKAIVDLLFKTNRKVTVKQLKEDYFKKIECFDSVEISGVEDRFNASLGTYHDLLKIIKDKDFLDNEENEDILEDIVLTLTLFEDREMIEERLKTYAHLFDDKVMKQLKRRRYTGWGRLSRKLINGIRDKQSGKTILDFLKSDGFANRNFMQLIHDDSLTFKEDIQKAQVSGQGDSLHEHIANLAGSPAIKKGILQTVKVVDELVKVMGRHKPENIVIEMARENQTTQKGQKNSRERMKRIEEGIKELGSQILKEHPVENTQLQNEKLYLYYLQNGRDMYVDQELDINRLSDYDVDHIVPQSFLKDDSIDNKVLTRSDKNRGKSDNVPSEEVVKKMKNYWRQLLNAKLITQRKFDNLTKAERGGLSELDKAGFIKRQLVETRQITKHVAQILDSRMNTKYDENDKLIREVKVITLKSKLVSDFRKDFQFYKVREINNYHHAHDAYLNAVVGTALIKKYPKLESEFVYGDYKVYDVRKMIAKSEQEIGKATAKYFFYSNIMNFFKTEITLANGEIRKRPLIETNGETGEIVWDKGRDFATVRKVLSMPQVNIVKKTEVQTGGFSKESILPKRNSDKLIARKKDWDPKKYGGFDSPTVAYSVLVVAKVEKGKSKKLKSVKELLGITIMERSSFEKNPIDFLEAKGYKEVKKDLIIKLPKYSLFELENGRKRMLASAGELQKGNELALPSKYVNFLYLASHYEKLKGSPEDNEQKQLFVEQHKHYLDEIIEQISEFSKRVILADANLDKVLSAYNKHRDKPIREQAENIIHLFTLTNLGAPAAFKYFDTTIDRKRYTSTKEVLDATLIHQSITGLYETRIDLSQLGGDKRPAATKKAGQAKKKK

SEQ ID NO: 541 - protein, 483 aa, Artificial Sequence
  Description of Artificial Sequence: Synthetic polypeptide
MFLFLSLTSFLSSSRTLVSKGEEDNMAIIKEFMRFKVHMEGSVNGHEFEIEGEGEGRPYEGTQTAKLKVTKGGPLPFAWDILSPQFMYGSKAYVKHPADIPDYLKLSFPEGFKWERVMNFEDGGVVTVTQDSSLQDGEFIYKVKLRGTNFPSDGPVMQKKTMGWEASSERMYPEDGALKGEIKQRLKLKDGGHYDAEVKTTYKAKKPVQLPGAYNVNIKLDITSHNEDYTIVEQYERAEGRHSTGGMDELYKGSKQLEELLSTSFDIQFNDLTLLETAFTHTSYANEHRLLNVSHNERLEFLGDAVLQLIISEYLFAKYPKKTEGDMSKLRSMIVREESLAGFSRFCSFDAYIKLGKGEEKSGGRRRDTILGDLFEAFLGALLLDKGIDAVRRFLKQVMIPQVEKGNFERVKDYKTCLQEFLQTKGDVAIDYQVISEKGPAHAKQFEVSIVVNGAVLSKGLGKSKKLAEQDAAKNALAQLSEV

SEQ ID NO: 542 - protein, 483 aa, Artificial Sequence
  Description of Artificial Sequence: Synthetic polypeptide
MKQLEELLSTSFDIQFNDLTLLETAFTHTSYANEHRLLNVSHNERLEFLGDAVLQLIISEYLFAKYPKKTEGDMSKLRSMIVREESLAGFSRFCSFDAYIKLGKGEEKSGGRRRDTILGDLFEAFLGALLLDKGIDAVRRFLKQVMIPQVEKGNFERVKDYKTCLQEFLQTKGDVAIDYQVISEKGPAHAKQFEVSIVVNGAVLSKGLGKSKKLAEQDAAKNALAQLSEVGSVSKGEEDNMAIIKEFMRFKVHMEGSVNGHEFEIEGEGEGRPYEGTQTAKLKVTKGGPLPFAWDILSPQFMYGSKAYVKHPADIPDYLKLSFPEGFKWERVMNFEDGGVVTVTQDSSLQDGEFIYKVKLRGTNFPSDGPVMQKKTMGWEASSERMYPEDGALKGEIKQRLKLKDGGHYDAEVKTTYKAKKPVQLPGAYNVNIKLDITSHNEDYTIVEQYERAEGRHSTGGMDELYKKRPAATKKAGQAKKKK

SEQ ID NO: 543 - protein, 1423 aa, Artificial Sequence
  Description of Artificial Sequence: Synthetic polypeptide
MDYKDHDGDYKDHDIDYKDDDDKMAPKKKRKVGIHGVPAADKKYSIGLAIGTNSVGWAVITDEYKVPSKKFKVLGNTDRHSIKKNLIGALLFDSGETAEATRLKRTARRRYTRRKNRICYLQEIFSNEMAKVDDSFFHRLEESFLVEEDKKHERHPIFGNIVDEVAYHEKYPTIYHLRKKLVDSTDKADLRLIYLALAHMIKFRGHFLIEGDLNPDNSDVDKLFIQLVQTYNQLFEENPINASGVDAKAILSARLSKSRRLENLIAQLPGEKKNGLFGNLIALSLGLTPNFKSNFDLAEDAKLQLSKDTYDDDLDNLLAQIGDQYADLFLAAKNLSDAILLSDILRVNTEITKAPLSASMIKRYDEHHQDLTLLKALVRQQLPEKYKEIFFDQSKNGYAGYIDGGASQEEFYKFIKPILEKMDGTEELLVKLNREDLLRKQRTFDNGSIPHQIHLGELHAILRRQEDFYPFLKDNREKIEKILTFRIPYYVGPLARGNSRFAWMTRKSEETITPWNFEEVVDKGASAQSFIERMTNFDKNLPNEKVLPKHSLLYEYFTVYNELTKVKYVTEGMRKPAFLSGEQKKAIVDLLFKTNRKVTVKQLKEDYFKKIECFDSVEISGVEDRFNASLGTYHDLLKIIKDKDFLDNEENEDILEDIVLTLTLFEDREMIEERLKTYAHLFDDKVMKQLKRRRYTGWGRLSRKLINGIRDKQSGKTILDFLKSDGFANRNFMQLIHDDSLTFKEDIQKAQVSGQGDSLHEHIANLAGSPAIKKGILQTVKVVDELVKVMGRHKPENIVIEMARENQTTQKGQKNSRERMKRIEEGIKELGSQILKEHPVENTQLQNEKLYLYYLQNGRDMYVDQELDINRLSDYDVDHIVPQSFLKDDSIDNKVLTRSDKNRGKSDNVPSEEVVKKMKNYWRQLLNAKLITQRKFDNLTKAERGGLSELDKAGFIKRQLVETRQITKHVAQILDSRMNTKYDENDKLIREVKVITLKSKLVSDFRKDFQFYKVREINNYHHAHDAYLNAVVGTALIKKYPKLESEFVYGDYKVYDVRKMIAKSEQEIGKATAKYFFYSNIMNFFKTEITLANGEIRKRPLIETNGETGEIVWDKGRDFATVRKVLSMPQVNIVKKTEVQTGGFSKESILPKRNSDKLIARKKDWDPKKYGGFDSPTVAYSVLVVAKVEKGKSKKLKSVKELLGITIMERSSFEKNPIDFLEAKGYKEVKKDLIIKLPKYSLFELENGRKRMLASAGELQKGNELALPSKYVNFLYLASHYEKLKGSPEDNEQKQLFVEQHKHYLDEIIEQISEFSKRVILADANLDKVLSAYNKHRDKPIREQAENIIHLFTLTNLGAPAAFKYFDTTIDRKRYTSTKEVLDATLIHQSITGLYETRIDLSQLGGDKRPAATKKAGQAKKKK

SEQ ID NO: 544 - DNA, 102 bp, Artificial Sequence
  Description of Artificial Sequence: Synthetic polynucleotide
gttttagagctatgctgttttgaatggtcccaaaacggaagggcctgagtccgagcagaagaagaagttttagagctatgctgttttgaatggtcccaaaac

SEQ ID NO: 545 - DNA, 100 bp, Homo sapiens
cggaggacaaagtacaaacggcagaagctggaggaggaagggcctgagtccgagcagaagaagaagggctcccatcacatcaaccggtggcgcattgcca

SEQ ID NO: 546 - DNA, 50 bp, Homo sapiens
agctggaggaggaagggcctgagtccgagcagaagaagaagggctcccac

SEQ ID NO: 547 - RNA, 30 nt, Artificial Sequence; identical to SEQ ID NO: 467
  Description of Artificial Sequence: Synthetic oligonucleotide

SEQ ID NO: 548 - DNA, 49 bp, Homo sapiens
agctggaggaggaagggcctgagtccgagcagaagagaagggctcccat

SEQ ID NO: 549 - DNA, 53 bp, Homo sapiens
ctggaggaggaagggcctgagtccgagcagaagaagaagggctcccatcacat

SEQ ID NO: 550 - DNA, 52 bp, Homo sapiens
ctggaggaggaagggcctgagtccgagcagaagagaagggctcccatcacat

SEQ ID NO: 551 - DNA, 54 bp, Homo sapiens
ctggaggaggaagggcctgagtccgagcagaagaaagaagggctcccatcacat

SEQ ID NO: 552 - DNA, 50 bp, Homo sapiens
ctggaggaggaagggcctgagtccgagcagaagaagggctcccatcacat

SEQ ID NO: 553 - DNA, 47 bp, Homo sapiens
ctggaggaggaagggcctgagcccgagcagaagggctcccatcacat

SEQ ID NO: 554 - DNA, 66 bp, Artificial Sequence
  Description of Artificial Sequence: Synthetic oligonucleotide
  Description of Combined DNA/RNA Molecule: Synthetic oligonucleotide
  modified_base (1)..(20): a, c, t, g, unknown or other
nnnnnnnnnnnnnnnnnnnnguuuuagagcuagaaauagcaaguuaaaauaaggctagtccguuuu

SEQ ID NO: 555 - RNA, 20 nt, Artificial Sequence
  Description of Artificial Sequence: Synthetic oligonucleotide
gaguccgagcagaagaagaa

SEQ ID NO: 556 - RNA, 20 nt, Artificial Sequence
  Description of Artificial Sequence: Synthetic oligonucleotide
gacaucgauguccuccccau

SEQ ID NO: 557 - RNA, 20 nt, Artificial Sequence
  Description of Artificial Sequence: Synthetic oligonucleotide
gucaccuccaaugacuaggg

SEQ ID NO: 558 - RNA, 20 nt, Artificial Sequence
  Description of Artificial Sequence: Synthetic oligonucleotide
auuggguguucagggcagag

SEQ ID NO: 559 - RNA, 20 nt, Artificial Sequence
  Description of Artificial Sequence: Synthetic oligonucleotide
guggcgagaggggccgagau

SEQ ID NO: 560 - RNA, 20 nt, Artificial Sequence
  Description of Artificial Sequence: Synthetic oligonucleotide
ggggccgagauuggguguuc

SEQ ID NO: 561 - RNA, 20 nt, Artificial Sequence
  Description of Artificial Sequence: Synthetic oligonucleotide
gugccauuagcuaaaugcau

SEQ ID NO: 562 - RNA, 20 nt, Artificial Sequence
  Description of Artificial Sequence: Synthetic oligonucleotide
guaccacccacaggugccag

SEQ ID NO: 563 - RNA, 20 nt, Artificial Sequence
  Description of Artificial Sequence: Synthetic oligonucleotide
gaaagccucugggccaggaa

SEQ ID NO: 564 - DNA, 33 bp, Homo sapiens; identical to SEQ ID NO: 46

SEQ ID NO: 565 - DNA, 33 bp, Homo sapiens; identical to SEQ ID NO: 47

SEQ ID NO: 566 - DNA, 33 bp, Homo sapiens; identical to SEQ ID NO: 48

SEQ ID NO: 567 - DNA, 33 bp, Homo sapiens; identical to SEQ ID NO: 49

SEQ ID NO: 568 - DNA, 33 bp, Homo sapiens; identical to SEQ ID NO: 50

SEQ ID NO: 569 - DNA, 33 bp, Homo sapiens; identical to SEQ ID NO: 51

SEQ ID NO: 570 - DNA, 33 bp, Homo sapiens; identical to SEQ ID NO: 52

SEQ ID NO: 571 - DNA, 33 bp, Homo sapiens; identical to SEQ ID NO: 53

SEQ ID NO: 572 - DNA, 33 bp, Homo sapiens; identical to SEQ ID NO: 54

SEQ ID NO: 573 - DNA, 33 bp, Homo sapiens; identical to SEQ ID NO: 55

SEQ ID NO: 574 - DNA, 33 bp, Homo sapiens; identical to SEQ ID NO: 56

SEQ ID NO: 575 - DNA, 33 bp, Mus musculus; identical to SEQ ID NO: 57

SEQ ID NO: 576 - DNA, 33 bp, Mus musculus; identical to SEQ ID NO: 58

SEQ ID NO: 577 - DNA, 33 bp, Mus musculus; identical to SEQ ID NO: 59

SEQ ID NO: 578 - DNA, 37 bp, Homo sapiens; identical to SEQ ID NO: 60

SEQ ID NO: 579 - DNA, 37 bp, Homo sapiens; identical to SEQ ID NO: 61

SEQ ID NO: 580 - DNA, 88 bp, Artificial Sequence
  Description of Artificial Sequence: Synthetic oligonucleotide
gttttagagctatgctgttttgaatggtcccaaaactgagaccaaaggtctcgttttagagctatgctgttttgaatggtcccaaaac

SEQ ID NO: 581 - DNA, 35 bp, Artificial Sequence
  Description of Artificial Sequence: Synthetic oligonucleotide
aaacggaagggcctgagtccgagcagaagaagaag

SEQ ID NO: 582 - DNA, 35 bp, Artificial Sequence
  Description of Artificial Sequence: Synthetic oligonucleotide
aaaacttcttcttctgctcggactcaggcccttcc

SEQ ID NO: 583 - RNA, 46 nt, Artificial Sequence; identical to SEQ ID NO: 498
  Description of Artificial Sequence: Synthetic oligonucleotide
  modified_base (1)..(19): a, c, u, g, unknown or other

SEQ ID NO: 584 - RNA, 91 nt, Artificial Sequence; identical to SEQ ID NO: 499
  Description of Artificial Sequence: Synthetic oligonucleotide

SEQ ID NO: 585 - DNA, 20 bp, Artificial Sequence
  Description of Artificial Sequence: Synthetic oligonucleotide
gtatacagaaacacagagaa

SEQ ID NO: 586 - DNA, 20 bp, Artificial Sequence
  Description of Artificial Sequence: Synthetic oligonucleotide
ggagtcacagaaactcagca

SEQ ID NO: 587 - DNA, 21 bp, Artificial Sequence
  Description of Artificial Sequence: Synthetic primer
aaaaccacccttctctctggc

SEQ ID NO: 588 - DNA, 21 bp, Artificial Sequence
  Description of Artificial Sequence: Synthetic primer
ggagattggagacacggagag

SEQ ID NO: 589 - DNA, 20 bp, Artificial Sequence
  Description of Artificial Sequence: Synthetic primer
ctggaaagccaatgcctgac

SEQ ID NO: 590 - DNA, 20 bp, Artificial Sequence
  Description of Artificial Sequence: Synthetic primer
ggcagcaaactccttgtcct

SEQ ID NO: 591 - DNA, 20 bp, Artificial Sequence
  Description of Artificial Sequence: Synthetic primer
gtgctttgcagaggcctacc

SEQ ID NO: 592 - DNA, 20 bp, Artificial Sequence
  Description of Artificial Sequence: Synthetic primer
cctggagcgcatgcagtagt

SEQ ID NO: 593 - DNA, 22 bp, Artificial Sequence
  Description of Artificial Sequence: Synthetic primer
accttctgtgtttccaccattc

SEQ ID NO: 594 - DNA, 20 bp, Artificial Sequence
  Description of Artificial Sequence: Synthetic primer
ttggggagtgcacagacttc

SEQ ID NO: 595 - DNA, 20 bp, Artificial Sequence
  Description of Artificial Sequence: Synthetic primer
ggctccctgggttcaaagta

SEQ ID NO: 596 - DNA, 21 bp, Artificial Sequence
  Description of Artificial Sequence: Synthetic primer
agaggggtctggatgtcgtaa

SEQ ID NO: 597 - DNA, 30 bp, Artificial Sequence; identical to SEQ ID NO: 72
  Description of Artificial Sequence: Synthetic probe

SEQ ID NO: 598 - DNA, 30 bp, Artificial Sequence; identical to SEQ ID NO: 73
  Description of Artificial Sequence: Synthetic probe

SEQ ID NO: 599 - protein, 1153 aa, Artificial Sequence
  Description of Artificial Sequence: Synthetic polypeptide
MKRPAATKKAGQAKKKKSDLVLGLDIGIGSVGVGILNKVTGEIIHKNSRIFPAAQAENNLVRRTNRQGRRLARRKKHRRVRLNRLFEESGLITDFTKISINLNPYQLRVKGLTDELSNEELFIALKNMVKHRGISYLDDASDDGNSSVGDYAQIVKENSKQLETKTPGQIQLERYQTYGQLRGDFTVEKDGKKHRLINVFPTSAYRSEALRILQTQQEFNPQITDEFINRYLEILTGKRKYYHGPGNEKSRTDYGRYRTSGETLDNIFGILIGKCTFYPDEFRAAKASYTAQEFNLLNDLNNLTVPTETKKLSKEQKNQIINYVKNEKAMGPAKLFKYIAKLLSCDVADIKGYRIDKSGKAEIHTFEAYRKMKTLETLDIEQMDRETLDKLAYVLTLNTEREGIQEALEHEFADGSFSQKQVDELVQFRKANSSIFGKGWHNFSVKLMMELIPELYETSEEQMTILTRLGKQKTTSSSNKTKYIDEKLLTEEIYNPVVAKSVRQAIKIVNAAIKEYGDFDNIVIEMARETNEDDEKKAIQKIQKANKDEKDAAMLKAANQYNGKAELPHSVFHGHKQLATKIRLWHQQGERCLYTGKTISIHDLINNSNQFEVDHILPLSITFDDSLANKVLVYATANQEKGQRTPYQALDSMDDAWSFRELKAFVRESKTLSNKKKEYLLTEEDISKFDVRKKFIERNLVDTRYASRVVLNALQEHFRAHKIDTKVSVVRGQFTSQLRRHWGIEKTRDTYHHHAVDALIIAASSQLNLWKKQKNTLVSYSEDQLLDIETGELISDDEYKESVFKAPYQHFVDTLKSKEFEDSILFSYQVDSKFNRKISDATIYATRQAKVGKDKADETYVLGKIKDIYTQDGYDAFMKIYKKDKSKFLMYRHDPQTFEKVIEPILENYPNKQINEKGKEVPCNPFLKYKEEHGYIRKYSKKGNGPEIKSLKYYDSKLGNHIDITPKDSNNKVVLQSVSPWRADVYFNKTTGKYEILGLKYADLQFEKGTGTYKISQEKYNDIKKKEGVDSDSEFKFTLYKNDLLLVKDTETKEQQLFRFLSRTMPKQKHYVELKPYDKQKFEGGEALIKVLGNVANSGQCKKGLGKSNISIYKVRTDVLGNQHIIKNEGDKPKLDFKRPAATKKAGQAKKKK

What is claimed is:

1. An engineered, non-naturally occurring Clustered Regularly Interspersed Short Palindromic Repeats (CRISPR)-CRISPR associated (Cas) (CRISPR-Cas) vector system comprising one or more vectors comprising:
a) a first regulatory element operably linked to one or more nucleotide sequences encoding one or more CRISPR-Cas system polynucleotide sequences comprising a guide sequence, a tracr RNA, and a tracr mate sequence, wherein the guide sequence hybridizes with one or more target sequences in polynucleotide loci in a eukaryotic cell,
b) a second regulatory element operably linked to a nucleotide sequence encoding a Type II Cas9 protein,
wherein components (a) and (b) are located on same or different vectors of the system,
wherein the CRISPR-Cas system comprises at least one switch,
whereby the activity of the system to target the one or more polynucleotide loci is controlled.

2. The system of claim 1, wherein the CRISPR-Cas system comprises a trans-activating cr (tracr) sequence.

3. The system of claim 1, wherein the Cas9 protein is codon optimized for expression in the eukaryotic cell and/or the eukaryotic cell is a mammalian or human cell.

4. The system of claim 1, wherein the Cas9 protein comprises two or more mutations; or wherein the Cas9 protein comprises two or more mutations selected from the group consisting of D10A, E762A, H840A, N854A, N863A and D986A with reference to the position numbering of a Streptococcus pyogenes Cas9 protein

5. The system of claim 1, wherein the one or more vectors are viral vectors

6. The system of claim 1, wherein the viral vectors are selected from the group consisting of retroviral, lentiviral, adenoviral, adeno-associated and herpes simplex viral vectors.

7. The system of claim 1, wherein the control as to the at least one switch or the activity of said system is activated, enhanced, terminated or repressed.

8. The system of claim 1, wherein the system further comprises at least one nuclear localization signal (NLS), functional domain, flexible linker, mutation, deletion, alteration or truncation.

9. The system of claim 1, wherein the inducer energy source is heat, ultrasound, electromagnetic energy, or chemical, a small molecule, a hormone, abscisic acid (ABA), rapamycin, 4-hydroxytamoxifen (4OHT), estrogen or ecdysone.

10. The system of claim 1, wherein the at least one switch is an antibiotic based inducible system, electromagnetic energy based inducible system, small molecule based inducible system, nuclear receptor based inducible system, hormone based inducible system, tetracycline (Tet) inducible system, light inducible system, ABA inducible system, 4OHT/estrogen inducible system, ecdysone-based inducible system or a FKBP12/FRAP (FKBP12-rapamycin complex) inducible system.

11. The system according to claim 10 wherein the inducer energy source is electromagnetic energy.

12. The system according to claim 11 wherein the electromagnetic energy is a component of visible light.

13. The system according to claim 12 wherein the component of visible light is blue light.

14. The system according to claim 14 wherein the blue light has an intensity of at least 0.2 mW/cm².

15. The system according to claim 8 wherein the at least one functional domain is a transposase domain, integrase domain, recombinase domain, resolvase domain, invertase domain, protease domain, DNA methyltransferase domain, DNA demethylase domain, histone acetylase domain, histone deacetylases domain, nuclease domain, transcriptional repressor domain, transcriptional activator domain, nuclear-localization signal domains, or cellular signal domain.

16. A method of modulating activity of the system of claim 1, comprising administering the inducer energy source to the system, wherein the activity of the system is controlled by contact with the inducer energy source.

17. An engineered, non-naturally occurring Transcription activator-like effector (TALE) system comprising a DNA binding polypeptide comprising:
a) a DNA binding domain comprising at least five or more Transcription activator-like effector (TALE) monomers and at least one or more half-monomers specifically ordered to target a locus of interest linked to an energy sensitive protein or fragment thereof, wherein the energy sensitive protein or fragment thereof undergoes a conformational change upon induction by an inducer energy source allowing it to bind an interacting partner, and/or
b) a DNA binding domain comprising at least one or more TALE monomers or half-monomers specifically ordered to target the locus of interest linked to the interacting partner, wherein the energy sensitive protein or fragment thereof binds to the interacting partner upon induction by the inducer energy source.

18. The system of claim 17, wherein the one or more vectors are viral vectors

19. The system of claim 17, wherein the viral vectors are selected from the group consisting of retroviral, lentiviral, adenoviral, adeno-associated and herpes simplex viral vectors.

20. The system of claim 17, wherein the control as to the at least one switch or the activity of said system is activated, enhanced, terminated or repressed.

21. The system of claim 17, wherein the system further comprises at least one nuclear localization signal (NLS), functional domain, flexible linker, mutation, deletion, alteration or truncation.

22. The system of claim 17, wherein the inducer energy source is heat, ultrasound, electromagnetic energy, or chemical, a small molecule, a hormone, abscisic acid (ABA), rapamycin, 4-hydroxytamoxifen (4OHT), estrogen or ecdysone.

23. The system of claim 17, wherein the at least one switch is an antibiotic based inducible system, electromagnetic energy based inducible system, small molecule based inducible system, nuclear receptor based inducible system, hormone based inducible system, tetracycline (Tet) inducible system, light inducible system, ABA inducible system, 4OHT/estrogen inducible system, ecdysone-based inducible system or a FKBP12/FRAP (FKBP12-rapamycin complex) inducible system.

24. The system according to claim 23 wherein the inducer energy source is electromagnetic energy.

25. The system according to claim 24 wherein the electromagnetic energy is a component of visible light.

26. The system according to claim 25 wherein the component of visible light is blue light.

27. The system according to claim 26 wherein the blue light has an intensity of at least 0.2 mW/cm².

28. The system according to claim 21 wherein the at least one functional domain is selected from the group consisting of: transposase domain, integrase domain, recombinase domain, resolvase domain, invertase domain, protease domain, DNA methyltransferase domain, DNA demethylase domain, histone acetylase domain, histone deacetylases domain, nuclease domain, transcriptional repressor domain, transcriptional activator domain, nuclear-localization signal domains, or cellular signal domain.

29. A method of modulating activity of the system of claim 17, comprising administering the inducer energy source to the system, wherein the activity of the system is controlled by contact with the inducer energy source.
